(19) United States
(12) Patent Application Publication
(10) Pub. No.: US 2025/0270511 A1
(43) Pub. Date: Aug. 28, 2025

(54) GENETICALLY ENGINEERED CELLS, THEIR USES, AND METHODS OF MAKING SAME

(71) Applicants: The United States of America, as represented by the Secretary, Department of Health and Human Servic, Bethesda, MD (US); Gemysis. Inc., Newtown, PA (US)

(72) Inventors: Rosandra N. Kaplan, Potomac, MD (US); Sabina A. Kratzmeier, Olney, MD (US); Cristina Contreras Burrola, Bethesda, MD (US); Briana C. Bergen, Newtown, PA (US); James Cronk, Baltimore, MD (US); Kailey Jackett, Syracuse, NY (US)

(73) Assignees: The United States of America, as represented by the Secretary, Department of Health and Human Servic, Bethesda, MD (US); Gemysis, Inc., Newtown, PA (US)

(21) Appl. No.: 18/858,315

(22) PCT Filed: Apr. 20, 2023
(86) PCT No.: PCT/US2023/066025

§ 371 Date: Oct. 19, 2024

Related U.S. Application Data
(60) Provisional application No. 63/333,000, filed on Apr. 20, 2022.

(51) Int. Cl. C12N 5/077; A61K 35/28; A61P 35/00; C07K 14/54; C07K 14/705; C07K 14/71; C12N 15/86

(52) U.S. Cl. CPC C12N 5/0669; A61K 35/28; A61P 35/00; C07K 14/5434; C07K 14/70503; C07K 14/70575; C07K 14/71; C12N 15/86; C12N 2510/00; C12N 2740/15043

(57) ABSTRACT

In aspects, the disclosure provides genetically engineered cells, uses of the cells, and methods of making the cells.

### CROSS-REFERENCE TO RELATED APPLICATIONS

[0001] This application claims the priority benefit of U.S. Provisional Patent Application No. 63/333,000, filed Apr. 20, 2022, the disclosure of which is incorporated herein by reference in its entirety.

### STATEMENT REGARDING FEDERALLY SPONSORED RESEARCH OR DEVELOPMENT

[0002] This invention was made with Government support under ZIABC011334-10 and ZIABC011332-06 awarded by the National Institutes of Health, National Cancer Institute. The Government has certain rights in the invention.

### INCORPORATION-BY-REFERENCE OF MATERIAL SUBMITTED ELECTRONICALLY

[0003] Incorporated by reference in its entirety herein is a computer-readable nucleotide/amino acid sequence listing submitted concurrently herewith and identified as follows: One 727,288 Byte Extensible Markup Language (xml) file named “766891_ST26.xml,” created on Apr. 20, 2023.

### BACKGROUND

[0004] Metastasis is the primary cause of death in patients with solid tumors. A deeper understanding of the regulators of this process is needed in order to develop effective therapeutic strategies.

[0005] Harnessing the immune system to target and eliminate distant metastatic lesions is a major challenge. Most immunotherapeutic strategies, including CAR-T cell therapy, are limited by immunosuppression in the tumor and pre-metastatic tumor microenvironment. Moreover, in mammals having primary tumors, immune cell populations are dysregulated and upregulate a core immune suppression gene signature typically resulting in metastatic tumor growth at one or more sites distant from the primary tumor.

[0006] There is a desire for an effective preventative and/or treatment method for metastasis.

[0007] There is also a need to rebalance dysregulated physiological microenvironments such as dysregulated tumor, immune and neurological microenvironments to treat primary tumors, treat and prevent metastasis, treat immune diseases and disorders, and neurological diseases and disorders and improve immunotherapy when used in combination.

### BRIEF SUMMARY

[0008] In aspects, the disclosure provides a myeloid cell or mesenchymal cell comprising exogenous mRNA, wherein the exogenous mRNA encodes IL12, membrane tethered IL12 (mIL12), a IL6 decoy receptor (IL6DR), CD40 Ligand (CD40L), a soluble Triggering Receptor expressed on Myeloid cells 2 decoy receptor (sTREM2), a tissue inhibitor of metalloproteinases (TIMPs), a dominant negative transforming growth factor β receptor II (TGFβRII), or a prostaglandin E2 receptor 2 decoy receptor (EP2DR).

[0009] In aspects, the disclosure provides a method of making a myeloid cell or mesenchymal cell that expresses a protein, the method comprising introducing to the myeloid cell or mesenchymal cell an mRNA (e.g., an exogenous mRNA) encoding IL12, membrane tethered IL12 (mIL12), a IL6 decoy receptor (IL6DR), CD40 Ligand (CD40L), a soluble Triggering Receptor expressed on Myeloid cells 2 decoy receptor (sTREM2), a tissue inhibitor of metalloproteinases (TIMPs), a dominant negative transforming growth factor β receptor II (TGFβRII), or a prostaglandin E2 receptor 2 decoy receptor (EP2DR).

[0010] In aspects, the disclosure provides a myeloid cell or mesenchymal cell comprising exogenous mRNA, wherein the exogenous mRNA encodes viral accessory protein x (Vpx).

[0011] In aspects, the disclosure provides a method of making a myeloid cell or mesenchymal cell that expresses a protein, the method comprising introducing to the myeloid cell or mesenchymal cell an mRNA encoding viral accessory protein x (Vpx).

[0012] In aspects, the disclosure provides a method of genetically modifying a myeloid cell or mesenchymal cell, the method comprising (a) introducing to the cell an mRNA encoding viral accessory protein x (Vpx), and (b) transducing the cell with a vector.

[0013] In aspects, the disclosure provides a myeloid cell or mesenchymal cell, wherein the cell has been genetically modified to inactivate, knockdown, or remove S100A8, S100A9, ARG1, IDO1, IL4, TGFβ1, TGFβ2, TGFβ3, ADAM17, CD39, CD73, CD274, CYBB/gp91phox/NOX2, BACE1, NCKAP1L, TREM2, EP2, IL12A, IL12B, or TNFA.

[0014] In aspects, the disclosure provides a method of making a genetically modified myeloid cell or mesenchymal cell, the method comprising using CRISPR to inactivate, knockdown, or remove S100A8, S100A9, ARG1, IDO1, IL4, TGFβ1, TGFβ2, TGFβ3, ADAM17, CD39, CD73, CD274, CYBB/gp91 phox/NOX2, BACE1, NCKAP1L, TREM2, EP2, IL12A, IL12B, or TNFA.

[0015] In aspects, the disclosure provides a nucleotide sequence for a 3′ UTR that improves the stability of a mRNA sequence. In aspects, cDNA is used to create the 3′ UTR sequence, and the cDNA comprises the sequence of KJ1 (SEQ ID NO: 6), mtRNR1-KJ1 (SEQ ID NO: 7), mtRNR1-AES-KJ1 (SEQ ID NO: 8), KJ2 (SEQ ID NO: 9), mtRNR1-KJ2 (SEQ ID NO: 10), mtRNR1-AES-KJ2 (SEQ ID NO: 11), or KJ3 (SEQ ID NO: 12).

[0016] Additional aspects are as described herein.

### BRIEF DESCRIPTION OF THE DRAWINGS

[0017] FIG. 1A presents a series of flow cytometry graphs showing expression levels of epidermal growth factor receptor (EGFR) mRNA over 20 hours in primary human monocytes.

[0018] FIG. 1B is a line graph showing expression levels of IL12 mRNA over the 20 hours after no electroporation (No EP) or electroporation (EP) with a truncated epidermal growth factor receptor and interleukin-12 (tEGFR-IL12) mRNA or no mRNA (blank EP) in fresh primary human monocytes (obtained from apheresis elutriation fraction) as measured by ELISA.

[0019] FIG. 2 is a graph showing expression levels of IL12 mRNA in primary human monocytes from Donor 1 or Donor 2 over the 6 hours after electroporation (EP) without mRNA (Blank EP) or with IL12 mRNA (IL12 EP) as measured by ELISA.

[0020] FIG. 3 presents flow cytometry plots of human Genetically Engineered Myeloid cells (GEMys) after electroporation with mRNA encoding human single chain IL12 or GFP.

[0021] FIG. 4 is a graph showing the expression levels of IL12 mRNA and IL12 protein expression in human GEMys or non-engineered myeloid cells over the 48 hours after EP with IL12 mRNA or no mRNA (Blank EP) as measured by RT-PCR and ELISA respectively.

[0022] FIG. 5A presents a flow cytometry dot plot showing baseline levels of high EGFR (EGFRhi) expression by lentiviral vector transduction in primary human myeloid cells without electroporation (No EP).

[0023] FIG. 5B presents a flow cytometry dot plot showing levels of high EGFR (EGFRhi) expression after EP with Viral protein x (Vpx) mRNA 24 hours prior to transduction with lentiviral vector containing EGFR.

[0024] FIG. 5C presents a flow cytometry plot comparing high EGFR expression from transduction with lentiviral vector containing EGFR after EP with Vpx mRNA or without mRNA (No EP).

[0025] FIG. 6 is a graph showing the expression levels of IL12 mRNA over 24 hours following EP with IL12 mRNA in fresh GEMys and in thawed GEMys that were cryopreserved immediately after EP.

[0026] FIG. 7 is a bar graph showing interferon gamma (IFNγ) production in donor matched lymphocytes after co-culture with human unstimulated T cells (Unstim), human T cells alone, No EP human monocytes (apheresis elutriation fraction that is not electroporated) and human T cells, GFP human monocytes/GEMys (genetically engineered apheresis elutriation fraction) and human T cells, human IL12 GEMys (genetically engineered myeloid cells-cells obtained from human apheresis elutriation fraction) and human T cells, No EP human monocytes (apheresis elutriation fraction without genetic engineering) alone, GFP human GEMys alone, and human IL12 GEMys alone.

[0027] FIG. 8A is a bar graph showing in vivo localization of human GEMys (genetically engineered myeloid cells) with Green Fluorescent Protein (GFP) mRNA (GFP GEMys) or human IL12 mRNA (IL12 GEMys) in the spleen, bone marrow, lung, and liver of NSG-SGM3 mice as measured by the percent of human CD45 positive cells of all live cells collected from these tissues 24 hours after intravenous GEMys injection. No cells indicates background staining levels in the tissues of mice that did not receive GEMys.

[0028] FIG. 8B is a bar graph showing the phenotype of human mRNA-GEMys in the lungs of NSG-SGM3 mice treated with GFP mRNA GEMys or IL12 mRNA GEMys as measured by CD11b⁺, CD33⁺, CD14⁺, CD15⁺, and HLA-DR⁺ cells as a percent of human CD45 positive cells in the lung.

[0029] FIGS. 9A-9E present graphs showing the expression levels of murine IL12 mRNA in the plasma (FIG. 9A), lung (FIG. 9B), spleen (FIG. 9C), liver (FIG. 9D), and orthotopic rhabdomyosarcoma tumor (FIG. 9E) of C57/B16 mice one day after no treatment, or injection with Clylcophosphamide and Fludrabine (Cy/Flu) alone, or injection with Cyclophosphamide & Fludarabine (Cy/Flu) and either fresh or cryopreserved thymocyte differentiation antigen 1.1 (Thy1.1) and IL12 mRNA murine GEMys.

[0030] FIG. 10A is a flow cytometry plot showing expression levels of CD40L in murine GEMys that are untransduced (UTD), or transduced with a lentiviral vector encoding either Thy1.1 or cluster of differentiation 40 ligand (CD40L).

[0031] FIG. 10B is a flow cytometry dot plot showing expression levels of CD40L in murine GEMys transduced with CD40L lentivirus.

[0032] FIG. 11 is a graph showing CD40 signaling in the human embryonic kidney (HEK)-Blue CD40L reporter cell line which allow for detection of bioactive CD40L through the activation of nuclear factor kappa-light-chain-enhancer of activated B cells (NF-κB) following CD40 stimulation. HEK-Blue CD40L reporter cell line following co-culture with untransduced, Thy1.1, or CD40L GEMys using NF-κB induction as measured by optical density (OD) at 650 nm. The dotted line shows the baseline OD from the HEK-Blue CD40L reporter cell line.

[0033] FIG. 12A presents bar graphs showing expression levels of cluster of differentiation 80 (CD80), cluster of differentiation 86 (CD86), and major histocompatibility complex II (MHCII) in classical denedritic cells (cDCs) after co-culture with untransduced, Thy1.1, and CD40L GEMys.

[0034] FIG. 12B presents bar graphs showing expression levels of CD80, CD86, and MHCII in B cells after co-culture with untransduced, Thy1.1, and CD40L GEMys.

[0035] FIG. 13 is an illustration showing the proposed mechanism of action of soluble triggering receptor expressed on myeloid cells 2 (sTREM2)-GEMys.

[0036] FIG. 14 is a bar graph showing the expression levels of human sTREM2 in murine GEMys that are untransduced (UTD) or transduced with a lentiviral vector encoding human STREM2 as measured by ELISA.

[0037] FIG. 15 is a graph showing the probability of survival over the 90 days following injection of F4 murine sygeneic osteosarcoma tumor cells in C57BL/6 mice after treatment with cyclophosphamide and fludarabine (Cy/Flu) alone or in combination with murine GEMys expressing soluble TREM2.

[0038] FIG. 16A is a drawing showing the experimental design used to testing the efficacy of sTREM2 GEMy and GD2 chimeric antigen receptor T cells (CART) treatments on tumor growth in NSG mice bearing midline glioma, also known as diffuse intrinsic pontine glioma (DIPG).

[0039] FIG. 16B is a graph showing the tumor growth curves of NSG mice bearing midline glioma also known as diffuse intrinsic pontine glioma (DIPG) when given a mock treatment or treated with: sTREM2 GEMy alone at Day 0, GD2 CART alone at Day 7, a combination of STREM2 GEMys with subtherapeutic dosing of GD2 CART given together at Day 7, or a combination of sTREM2 GEMys given at Day 0 and GD2 CART given at Day 7. The dashed line represent when no more tumor is measurable.

[0040] FIG. 16C shows a schematic of mechanisms by which sTREM2 in combination with immunotherapy can alleviate myeloid mediated immune suppression and improve anti-tumor T cell efficacy.

[0041] FIG. 17 is a bar graph showing the percent of GFP positive cells in the SC human monocyte cell line (CRL-9855) that was untransduced (UTD) or transduced with a lentiviral vector encoding GFP and either the promoter EF1a or the myeloid specific promoters sp107, sp144, MMP12, combined sp107 and MMP14, or combined sp144 and MMP14 promoter sequences.

[0042] FIG. 18 is a bar graph showing the GFP positive percentage of CD14+ cells in primary human monocytes cultures that underwent EP of Vpx mRNA 24 hours prior to treatment and were untransduced or transduced with a lentiviral vector encoding GFP and either the promoter EF1a or the myeloid specific promoters, sp107, sp144, MMP14, combined sp107 and MMP14, or combined sp144 and MMP14 promoter sequences.

### DETAILED DESCRIPTION

[0043] It has been found that introduction of mRNA into myeloid cells, e.g., human elutriated monocytes (RO elutration fraction from apheresis cell product), allows for fast and transient expression of cargo proteins without the need for extended culture protocols, which are technically challenging given the short lifespan of these types of cells. Myeloid cells include macrophages, monocytes, dendritic cells, monocytic dendritic cells, and granulocytes.

[0044] Provided herein are synthetic messenger ribonucleic acids (mRNAs) for transducing, e.g., autologous or allogenic myeloid cells for use in rebalancing dysregulated niches or microenvironments.

[0045] Also provided herein are methods for advantageously using synthetic messenger ribonucleic acid (mRNA) to transduce, e.g., myeloid cells, and using such myeloid cells to rebalance dysregulated niches or microenvironments, such as tumor, immune, and neurological microenvironments.

[0046] In aspects, the disclosure provides a genetically engineered myeloid cell (GEMy) comprising mRNA (e.g., exogenous mRNA) introduced into the myeloid cell, such as by electroporation or other suitable method for introducing a desired mRNA into the myeloid cell. Provided herein are myeloid cells transduced with one or more mRNAs (e.g., exogenous mRNA) for rebalancing dysregulated niches. In aspects the mRNA is modified to include sequences that specifically promote stability in myeloid cells. In aspects, the dysregulated niche is a tumor microenvironment (TME) or metastatic microenvironment at a site distant from the site of a primary tumor.

[0047] In aspects, the disclosure provides a composition comprising (a) myeloid cells, including but not limited to monocytes, monocytic dendritic cells, macrophages, and neutrophils; or (b) genetically modified hematopoietic stem and progenitor cells (HSPCs); or (c) genetically modified mesenchymal cells; or (d) any combination of (a), (b), and (c), wherein the cells contain an mRNA (e.g., an exogenous mRNA) for expression of one or more proteins to treat or prevent a tumor and/or metastasis by modulating the tumor microenvironment.

[0048] In aspects, the disclosure provides a composition comprising (a) myeloid cells, including but not limited to monocytes, monocytic dendritic cells, macrophages, and neutrophils; or (b) genetically modified hematopoietic stem and progenitor cells (HSPCs); or (c) genetically modified mesenchymal cells; or (d) any combination of (a), (b), and (c), wherein the cells contain a modified mRNA (e.g., an exogenous modified mRNA) for expression of one or more proteins to treat an autoimmune or neurological disease or disorder by modulating a dysregulated niche. Dysregulated niches are characterized by immune suppressive myeloid cells or overactive inflammatory myeloid cells, activated pericytes, fibroblasts and active extracellular matrix remodeling and in some cases activated, dysfunctional exhausted T cells, and overactive or absent T regulatory cells.

[0049] In aspects, any of the myeloid cells, methods for making myeloid cells, or methods for making genetically modified myeloid cells may substitute hematopoietic stem and progenitor cells (HSPCs) or genetically modified mesenchymal cells (GEMesys) for said myeloid cells.

[0050] In aspects, the disclosure provides a myeloid cell or mesenchymal cell comprising lentivirus or mRNA (e.g., exogenous mRNA), wherein the lentivirus or mRNA encodes IL12, a IL6 decoy receptor (IL6DR), CD40 Ligand (CD40L), a soluble Triggering Receptor expressed on Myeloid cells 2 decoy receptor (sTREM2), a tissue inhibitor of metalloproteinases (TIMPs), a dominant negative transforming growth factor β receptor II or III (TGFβRII or TGFβRIII), or an EP2 decoy receptor. In aspects, the disclosure provides a myeloid cell or mesenchymal cell comprising exogenous mRNA, wherein the exogenous mRNA encodes viral accessory protein x (Vpx).

[0051] mRNA is not constrained by size limits; and it does not integrate into the host genome.

[0052] Provided herein are synthetic mRNAs for use in transfecting the, e.g., myeloid cells wherein the mRNA comprises an open reading frame (ORF) encoding a protein for treating a dysregulated microenvironment. In aspects, the mRNA further comprises 5′ and 3′ untranslated regions (UTRs), a 5′ cap and 3′ poly(A) tail. In aspects, the mRNA further comprises an initiation of translation sequence, such as, a Kozak sequence GCC (GCCRCCATGG) (SEQ ID NO: 1) where R is a purine (A or G) (Kozak, Gene 299:1-34 2002). In aspects the sequence comprises GCCGCCACC before the start codon of the mRNA. In aspects, the mRNA further comprises modifications of the 3′ UTR to improve myeloid cell or mesenchymal cell specific stability and translation into protein.

[0053] In aspects, the mRNA comprises two sequences encoding subunits of a therapeutic protein joined by a linker, for example, an mRNA comprising a polynucleotide sequence encoding an IL-12 p40 subunit, a linker, and an IL-12 p35 subunit. Suitable linkers for use in the polynucleotides include glycine-serine (GS) linkers, such as, Gly6Ser and (Gly4Ser) n linkers wherein n is the number of repeats of the motif (n=1, 2, 3, 4, 5, etc.), for example, (Gly4Ser) 3.

[0054] The mRNA can be synthesized by any suitable method such as, for example, by polymerase chain reaction (PCR) amplification, linearized plasmid DNA in combination with cell-free in vitro transcription (IVT) of mRNA, transcribing RNA from double stranded deoxyribonucleic acid (dsDNA, e.g., cDNA), or solid-phase synthesis of RNA.

[0055] In aspects, the DNA for synthesizing mRNA comprises an RNA promoter such as a DNA dependent RNA polymerase promoter sequence, a 5′ untranslated region (UTR), a Kozak sequence, a nucleic acid sequence encoding a protein or fusion protein for rebalancing a dysregulated microenvironment, and a 3′ UTR

[0056] In aspects, the mRNA is modified to enhance its stability, translatability, and regulatability, thereby regulating the amount and the timing of protein expression from the mRNA. In aspects, the mRNA includes co-transcriptional or post-transcriptional modifications such as but not limited to, adding a 5′ CAP and a 3′ poly-adenosine (poly A) tail. In aspects, subgenomic promoter sequences are used to generate self-amplifying RNA. In aspects, the mRNAs contain binding sequences for myeloid-specific RNA binding proteins wherein the myeloid specific binding sequences (also referred to herein as myeloid specific binding sites) are modified to modulate mRNA stability and translatability In aspects inducible mRNA transcripts may be prepared, e.g., that allow for small molecule inducible regulation (expression “on” or “off” in response to treatment) of specific proteins from these regulatable modified mRNAs. In aspects the inducible gene system is a doxorubicin or FK506 binding protein 12 (FKBP) destabilizing domain or protease inducible system. In aspects canonical RNA processing mechanisms may be used, such as, e.g., capping, splicing, polyadenylation, degradation, stabilization, and trafficking. In aspects group I introns and permuted intron-exon sequences may be added to enable autocatalytic circular RNA; adding these sequences can promote circularization of RNA which promotes its stability as it is less susceptible to endonucleases.

[0057] The genetically engineered myeloid cells can be from any suitable source in a mammal, including bone marrow and blood (e.g., peripheral blood). In aspects, the genetically engineered myeloid cells are obtained by differentiating hematopoietic stem and progenitor cells (HSPCs), which can be obtained by isolating CD34⁺ cells or performing lineage depletion of bone marrow or blood cells of Ter119, CD31, CD3, CD19, CD56, and CD11b. In aspects, the genetically modified myeloid cells are genetically modified bone marrow-derived myeloid cells that can express CD33 and CXCR4. In aspects any of the myeloid cells and methods for producing myeloid cells or genetically modifying myeloid cells described herein can substitute HSPCs for myeloid cells.

[0058] Any suitable means for differentiating genetically modified HSPCs into myeloid cells can be used. For example, media supporting myeloid cell differentiation includes, but is not limited to, StemSpan SFEM II (StemCell Technologies), StemSpan CD34+ Expansion Supplement (StemCell Technologies), StemSpan Myeloid Expansion Supplement II (StemCell Technologies), or other suitable media with the addition of cytokines such as SCF, FLT3L, IL-6, IL-3, G-CSF, GM-CSF, or M-CSF or activation factors including but not limited to IFNα, IFNγ, IL-1α, TLR agonists, STING agonists, RGD peptides, or fibronectin, or any combination thereof. Genetically engineered myeloid cells can be generated in vitro prior to administration to a mammal. Genetically engineered myeloid cells can be further differentiated when administered in vivo.

[0059] In aspects, the genetically engineered myeloid cells or mesenchymal cells express CD33, (i.e., the GEMys are differentiated from CD34+ cells).

[0060] In aspects, the disclosure provides a myeloid cell or mesenchymal cell comprising mRNA wherein the exogenous mRNA encodes a polypeptide for modulating a tumor, metastatic, immune and/or neurological microenvironment. In aspects, the myeloid cell or mesenchymal cell comprises exogenous mRNAs encoding one or more polypeptides for modulating a microenvironment, such as, for example, an exogenous mRNA encoding a cytokine and an exogenous mRNA encoding a protein that activates T cells and/or induces interferon gamma (IFN-γ).

[0061] In aspects, the disclosure provides a method of making a myeloid cell or mesenchymal cell that expresses a protein, the method comprising introducing into the myeloid cell or mesenchymal cell a lentiviral vector or an mRNA (e.g., an exogenous mRNA) encoding IL12, a IL6 decoy receptor (IL6DR), CD40 Ligand (CD40L), a soluble Triggering Receptor expressed on Myeloid cells 2 decoy receptor (sTREM2), a tissue inhibitor of metalloproteinases (TIMPs), a dominant negative transforming growth factor β receptor II or III (TGFβRII or TGFβRIII), or an EP2 decoy receptor. In aspects, the disclosure provides a method of making a myeloid cell or mesenchymal cell that expresses an exogenous protein, the method comprising introducing to the myeloid cell or mesenchymal cell an mRNA encoding viral accessory protein x (Vpx). In aspects, the disclosure provides a method of genetically modifying a myeloid cell or mesenchymal cell, the method comprising (a) introducing to the cell an mRNA encoding viral accessory protein x (Vpx), and (b) transducing the cell with a vector.

[0062] In aspects, introduction of mRNA to a cell is through electroporation, though any suitable method may be used, including but not limited to liposome delivery or microfluidic squeezing protocols. In aspects, the mRNA is introduced into a myeloid cell or mesenchymal cell by pulsing, lipofection, or microfluidic squeezing protocols.

[0063] In aspects, the myeloid cell or mesenchymal cell comprises a vector, which may comprise a transgene. Examples of suitable vectors include plasmids (e.g., DNA plasmids), bacterial vectors (e.g., a Listeria or Salmonella vector), yeast vectors, and viral vectors. In aspects, the vector is a viral vector, such as retrovirus, poxvirus, e.g., an orthopox (e.g., vaccinia, modified vaccinia Ankara (MVA), Wyeth, NYVAC, TROYVAC, Dry-Vax, or POXVAC-TC), avipox (e,g., fowlpox, pigeonpox, or canarypox, such as ALVAC), raccoon pox, rabbit pox, capripox (e.g., goat pox or sheep pox), leporipox, or suipox (e.g., swinepox), adenovirus, adeno-associated virus, herpes virus, polio virus, alphavirus, baculorvirus, and Sindbis virus. In aspects, the vector is a lentiviral vector.

[0064] Retroviral vectors, including lentiviral vectors, are suitable delivery vehicles for the stable introduction of a variety of genes of interest into the genomic DNA of a broad range of target cells. Without being bound by theory, the ability of retroviral vectors to deliver unrearranged, single copy transgenes into cells makes retroviral vectors well suited for transferring genes into cells. Further, retroviruses enter host cells by the binding of retroviral envelope glycoproteins to specific cell surface receptors on the host cells. Consequently, pseudotyped retroviral vectors in which the encoded native envelope protein is replaced by a heterologous envelope protein that has a different cellular specificity than the native envelope protein (e.g., binds to a different cell-surface receptor as compared to the native envelope protein) also can be used.

[0065] There are many retroviruses and examples include: murine leukemia virus (MLV), lentivirus such as human immunodeficiency virus (HIV), equine infectious anaemia virus (EIAV), mouse mammary tumor virus (MMTV), Rous sarcoma virus (RSV), Fujinami sarcoma virus (FuSV), Moloney murine leukemia virus (Mo-MLV), FBR murine osteosarcoma virus (FBR MSV), Moloney murine sarcoma virus (Mo-MSV), Abelson murine leukemia virus (A-MLV), Avian myelocytomatosis virus-29 (MC29), and Avian erythroblastosis virus (AEV). Other retroviruses suitable for use include, but are not limited to, Avian Leukosis Virus, Bovine Leukemia Virus, and Mink-Cell Focus-Inducing Virus. The core sequence of the retroviral vectors can be derived from a wide variety of retroviruses, including for example, B, C, and D type retroviruses, as well as spumaviruses and lentiviruses.

[0066] In aspects, the lentivirus is a human immunodeficiency virus (HIV), for example, type 1 or 2 (i.e., HIV-1 or HIV-2). Other lentivirus vectors include sheep Visna/maedi virus, feline immunodeficiency virus (FIV), bovine lentivirus, simian immunodeficiency virus (SIV), an equine infectious anemia virus (EIAV), and a caprine arthritis-encephalitis virus (CAEV).

[0067] In addition to the transgene, the vector can include an expression control sequence operatively linked to the transgene's coding sequence, such that expression of the coding sequence is achieved under conditions compatible with the expression control sequences. The expression control sequences include, but are not limited to, appropriate promoters, enhancers, transcription terminators, Kozak sequence, a start codon (i.e., ATG) in front of a protein-encoding gene, signal peptide sequence for targeting to the secretory pathway, splicing signal for introns, maintenance of the correct reading frame of that gene to permit proper translation of mRNA, and stop codons. Suitable promoters include, but are not limited to, a hVMD2 promoter, an SV40 early promoter, RSV promoter, adenovirus major late promoter, human CMV immediate early I promoter, poxvirus promoter, 30K promoter, I3 promoter, sE/L promoter, 7.5K promoter, 40K promoter, C1 promoter, and EF-1a promoter. In aspects myeloid specific or synthetic myeloid promoters can be used. Further, cell-type specific or inducible promoters can be used to limit expression to myeloid cells in the tumor microenvironment, such as myeloid specific synthetic promoters (sp-144, sp-107) and other suitable promoters including myeloid specific promoters for improved expression of desired cargo proteins in myeloid cells, such as, myeloid specific transcription factor promoters SP1, Pu. 1a, Pu. 1b, C/EBPa, AP1, AML-1, LYSMD1, CBF, BCL2, MYB, GATA, MMP14, and variants thereof.

[0068] The term “enhancer” as used herein, refers to a DNA sequence that increases transcription of, for example, a nucleic acid sequence to which it is operably linked. Enhancers can be located many kilobases away from the coding region of the nucleic acid sequence and can mediate the binding of regulatory factors, patterns of DNA methylation, or changes in DNA structure. A large number of enhancers from a variety of different sources are well known in the art and are available as or within cloned polynucleotides (from, e.g., depositories such as the ATCC as well as other commercial or individual sources). A number of polynucleotides comprising promoters (such as the commonly-used CMV promoter) also comprise enhancer sequences. Enhancers can be located upstream, within, or downstream of coding sequences.

[0069] Additionally, the vector can comprise a reporter to identify the transfection/transduction efficiency of the vector. Exemplary reporters include, but are not limited to, epidermal growth factor receptor (EGFR), Thy1.1 (CD90.1), or low-affinity human nerve growth factor receptor (LNGFR). Truncated EGFR (tEGFR) can be used as a reporter to measure transduction efficiency and as a potential safety switch to deplete transduced cells in vivo by using anti-EGFR antibody (such as Cetuximab).

[0070] The transgene can be any suitable transgene, such as transgene encoding one or more of a cytokine, a chemokine, an enzyme, a substrate, a transcription factor, a receptor decoy/dead receptor (e.g., sTREM2, IL6DR, or TNFα decoy/dead receptor), an antibody (e.g., scFv, IgG, or a bispecific or trispecific antibody for secretion, binding, and opsonizing tumor/increasing phagocytosis; or an antibody-drug that targets tumor cells, damaged neurons, or damaged, dead or dying cells), a suicide gene system, a CRISPR edited gene, or a protein induced after binding a receptor.

[0071] In aspects, the transgene encodes an enzyme that is an extracellular matrix remodeling protein, such as hyaluronidase. In aspects, the transgene encodes a suicide gene system, for example, a Herpes Simplex Virus Thymidine Kinase (HSVTK)/Ganciclovir (GCV) suicide gene system and an inducible Caspase suicide gene system. In aspects the transgene encodes a gene of a inducible gene system, wherein the inducible gene system is a doxorubicin or FK506 binding protein 12 (FKBP) destabilizing domain or protease inducible system. In aspects, the transgene can encode a cytokine, chemokine, or a related protein, such as IL-12, CXCL9, CXCL10 (anti-tumor); IL-10, SMAD (immune suppressing to rebalance the immune milieu), TGFβIL-2, TREM1, sTREM2, CD2AP, GPR32, FPR2, P2ry2, P2ry6, ChemR23, ERV, GPR32, GPR18, GPR37, and LGR6. In aspects, the transgene encodes IL-12, CXCL9, IL-10, STREM2, or CD2AP.

[0072] In aspects, there are one or more (e.g., 2, 3, 4, or more) transgenes, which may or may not perform complementary functions. For example, CXCL9 recruits T-cells and IL-12 activates T cells for the purpose of treating and/or preventing tumor metastasis. The one or more transgenes can be present in a single vector. Alternatively, one or more vectors can be employed each containing one or more transgenes, wherein the transgenes in the one or more vectors can be the same or different.

[0073] The disclosure also contemplates an inducible transgene. For example, in an inducible system, the expression of one or more transgenes can depend on temperature, pH, oxygen levels, and/or the presence of a particular small molecule. An inducible system can be used to target specific cells or tissues in a mammal and/or target particular disorders.

[0074] In aspects, the transgene encodes a protein that only is released after exposure to a specific extracellular matrix protein or in response to a tumor specific protein or in response to a particular secreted protein, pH change, oxygen level, or receptor signaling.

[0075] In aspects, the disclosure provides a myeloid cell or mesenchymal cell, wherein the cell has been genetically modified to remove/knockout, silence or knockdown, one or more of the following genes: S100A8, S100A9, ARG1, IDO1, IL4, TGFβ1, ADAM17, MMP9, CD39, CD73, CD274, CYBB/gp91phox/NOX2, BACE1, NCKAP1L, TREM2, EP2, IL12A, IL12B, and TNFA. In aspects, the disclosure provides a method of making a genetically modified myeloid cell or mesenchymal cell, the method comprising removing, inactivating, or editing a gene, e.g., any of S100A8, S100A9, ARG1, IDO1, IL4, TGFβ1, ADAM17, MM9, CD39, CD73, CD274, CYBB/gp91phox/NOX2, BACE1, NCKAP1L, TREM2, EP2, IL12A, IL12B, and TNFA, or others, using CRISPR.

[0076] In solid tumors, immunotherapeutic strategies have been limited by the ability of T cells to penetrate deep into tumors and to persist, due to suppression by myeloid cells accumulating in tumor microenvironment (TME). Myeloid cells are part of the innate immune system and are multifunctional. They can be directly cytotoxic, capable of antigen presentation and efficient at tissue repair. During repair, myeloid cells dampen immune response to prevent immune-mediated tissue damage. Myeloid cells are also the first responders to damaged tissue sites and the most abundant cell in the tumor microenvironment. These myeloid can be overactive and elicit continued inflammatory activation in other dysregulated microenvironments. By modulating myeloid cells as described in several aspect this approach can be used to limit myeloid mediated immune suppression to promote effective anti-tumor immunity and improve existing immunotherapy. In aspects modulating myeloid cells can allow for myeloid mediated immune suppression when the environment is highly activated, inflammatory, and induced to on-going overzealous immune activation.

[0077] In aspects, the disclosure provides a method of treating a mammal having a tumor, the method comprising administering to the mammal a therapeutically effective amount of a population of myeloid cell or mesenchymal cells as described herein.

[0078] The genetically engineered myeloid cells or mesenchymal cells can be administered to a mammal with cancer in order to treat cancer. Non-limiting examples of specific types of cancers include cancer of the head and neck, eye, skin, mouth, throat, esophagus, chest, bone, lung, colon, sigmoid, rectum, stomach, prostate, breast, ovaries, kidney, liver, pancreas, brain, intestine, heart or adrenals. More particularly, cancers include solid tumor, sarcoma, carcinomas, fibrosarcoma, myxosarcoma, liposarcoma, chondrosarcoma, osteogenic sarcoma, chordoma, angiosarcoma, endotheliosarcoma, lymphangiosarcoma, lymphangioendothelio sarcoma, synovial sarcoma, medullary thyroid carcinoma, adrenocortical carcinoma, desmoplastic small round cell tumor (DSRCT), malignant peripheral nerve sheath tumors (MPNST), pericytoma, NTRK+ and NTRK− fusion tumors, rhabdoid tumors, Fusion negative, Ewings like sarcomas, mesothelioma, Ewings tumor, leiomyosarcoma, rhabdomyosarcoma, colon carcinoma, pancreatic cancer, breast cancer, ovarian cancer, prostate cancer, squamous cell carcinoma, basal cell carcinoma, adenocarcinoma, sweat gland carcinoma, sebaceous gland carcinoma, papillary carcinoma, papillary adenocarcinomas, cystadenocarcinoma, medullary carcinoma, bronchogenic carcinoma, renal cell carcinoma, hepatoma, bile duct carcinoma, choriocarcinoma, seminoma, embryonal carcinoma, Wilms' tumor, cervical cancer, testicular tumor, lung carcinoma, small cell lung carcinoma, bladder carcinoma, epithelial carcinoma, glioma, astrocytoma, medulloblastoma, craniopharyngioma, ependymoma, Kaposi's sarcoma, pinealoma, hemangioblastoma, acoustic neuroma, oligodendroglioma, menangioma, melanoma, neuroblastoma, retinoblastoma, a blood-born tumor, acute lymphoblastic leukemia, acute lymphoblastic B-cell leukemia, acute lymphoblastic T-cell leukemia, acute myeloblastic leukemia, acute promyelocytic leukemia, acute monoblastic leukemia, acute erythroleukemic leukemia, acute megakaryoblastic leukemia, acute myelomonocytic leukemia, acute lymphocyctic leukemia, acute undifferentiated leukemia, chronic myelocytic leukemia, chronic lymphocytic leukemia, hairy cell leukemia, or multiple myeloma as well as ultra/very rare cancers such as globus tumors, PECOMAs, IMF, GIST, chordomas, etc.

[0079] Treatment of cancer comprises, but is not limited to, destroying tumor cells, reducing tumor burden, inhibiting tumor growth, reducing the size of the primary tumor, reducing the number of metastatic lesions, increasing survival of the mammal, delaying, inhibiting, arresting or preventing the onset or development of metastatic cancer (such as by delaying, inhibiting, arresting or preventing the onset of development of tumor migration and/or tumor invasion of tissues outside of primary cancer and/or other processes associated with metastatic progression of cancer), delaying or arresting primary cancer progression, improving immune responses against the tumor, improving long term memory immune responses against tumor antigens, and/or improving the general health of the patient with illness. It will be appreciated that tumor cell death can occur without a substantial decrease in tumor size due to, for instance, the presence of supporting cells, vascularization, fibrous matrices, etc. Accordingly, while reduction in tumor size is preferred, it is not required in the treatment of cancer.

[0080] The terms “treat,” and “prevent” as well as words stemming therefrom, as used herein, do not necessarily imply 100% or complete treatment or prevention. Rather, there are varying degrees of treatment or prevention of which one of ordinary skill in the art recognizes as having a potential benefit or therapeutic effect. In this respect, the inventive methods can provide any amount of any level of treatment or prevention of cancer in a mammal. Furthermore, the treatment or prevention provided by the inventive method can include treatment or prevention of one or more conditions or symptoms of the disease, e.g., cancer, being treated or prevented. Also, for purposes herein, “prevention” can encompass delaying the onset of the disease, e.g., cancer, or a symptom or condition thereof or preventing the recurrence of the disease, e.g., cancer.

[0081] Accordingly, the disclosure provides methods of reducing tumor growth or reducing or preventing recurrence of tumor growth in a mammal with cancer, extending survival time of a mammal with cancer, and preventing tumor dormancy in a mammal with cancer by administering the genetically engineered myeloid cells or mesenchymal cells to the mammal. In aspects, the cancer or tumor has not yet metastasized in the mammal.

[0082] Additionally, the disclosure provides a method of reducing or preventing metastasis in a mammal with cancer comprising administering the genetically engineered myeloid cells or mesenchymal cells to the mammal.

[0083] When the mammal has already been diagnosed with cancer (e.g., metastatic cancer), the genetically engineered myeloid cells or mesenchymal cells can be administered in conjunction with other therapeutic treatments such as chemotherapy, surgical resection of a tumor, treatment with targeted cancer therapy, allogeneic or autologous stem cell transplantation, T cell adoptive transfer, other immunotherapies, radiation and/or myeloid-targeting pre-conditioning regimens such as clodronate or CSF1R inhibitors. In particular, the genetically engineered myeloid cells or mesenchymal cells can be administered (concurrently or concomitantly or sequentially) with an additional therapeutic agent including, but not limited to, chimeric antigen receptor (CAR)-modified T cells, T cell receptor (TCR)-modified T cells, a dendritic cell vaccine, an oncolytic virus, chemotherapy, a small molecule, a monoclonal antibody or antigen binding fragments thereof, hormone-blocking therapy, and/or radiation therapy.

[0084] In aspects, the method includes different temporal administrations. For example, a first population of genetically engineered myeloid cells or mesenchymal cells is administered prior to (i.e., sequential delivery) a second population of genetically engineered myeloid cells or mesenchymal cells. In aspects, a first population of genetically engineered myeloid cells or mesenchymal cells is administered at the same time as a second population of genetically engineered myeloid cells or mesenchymal cells.

[0085] Genetically engineered myeloid cells (GEMys) or mesenchymal cells (GEMesys) allow for repeat dosing and combinatorial targets with multiple mRNA transcripts. Alterations to mRNA can be made to modulate its immunogenicity, stability, and the efficacy by which it is translated into protein. Different modified RNAs can be introduced to express protein products of interest to deliver locally to the tumor and metastatic microenvironment.

[0086] Genetically engineered myeloid cells or mesenchymal cells created with two or more different mRVAs introduced into the same myeloid cell or mesenchymal cells, two or more different mRVA engineered g myeloid cells or mesenchymal cells, or multiple different mRNA genetically engineered myeloid cells or mesenchymal cells or lentiviral vector-engineered myeloid cells or mesenchymal cells can be given together as a cocktail cell therapy. This would allow for multiple synergistic approaches, such as, e.g., production of the cytokine IL-12, a STREM2 decoy receptor and CD40L GEMys or tumor antigens given together to target and activate the immune milieu in the tumor microenvironment (TME). In some aspects delivery of STREM2 decoy receptor genetically engineered myeloid or mesenchymal cells can be given with IL12 genetically engineered myeloid or mesenchymal cells or with mesenchymal cells engineered to express hyaluronindase. In some aspects, CD40 expressing genetically engineered myeloid cells or mesenchymal cells and CD40L expressing genetically engineered myeloid cells or mesenchymal cells and CD40L secreting genetically engineered myeloid cells or mesenchymal cells can be can be administered as a cocktail to stimulate adaptive anti-tumor immunity and establish good prognostic tertiary lymphoid structures. This approach can also be used to tailor treatment for tumor metastases. This approach can also be combined with checkpoint blockade therapy or other immunotherapy or chemotherapy or radiotherapy approaches.

[0087] Most T cell therapies currently used in the clinic are given following a pre-conditioning regimen of cyclophosphamide and fludarabine (Cy/Flu). Therefore, the method of the disclosure can include the administration of cyclophosphamide, fludarabine, myeloid-targeting pre-conditioning including but not limited to clodronate liposomes or CSF1R inhibitors, or a combination thereof.

[0088] In aspects, the method of treating cancer includes surgical resection of a tumor and administration of the genetically engineered myeloid cells or mesenchymal cells.

[0089] The disclosure also provides a method of treating a neurodegenerative condition, autoimmune disorder, or inflammatory disorder in a mammal comprising administering the genetically engineered myeloid cells or mesenchymal cells. Exemplary neurodegenerative conditions, autoimmune disorders, and inflammatory disorders include, but are not limited to. Alzheimer's disease, amyotrophic lateral sclerosis, inflammatory bowel disease (IBD), Crohn's disease, rheumatoid arthritis, graft versus host disease (GVHD), multiple sclerosis, and alopecia areata.

[0090] Additionally, the disclosure provides a method of rebalancing dysregulated niches; restoring gut function, memory, behavior, hair growth, nail growth, and/or marrow function; or reducing or preventing movement disorders, memory dysfunction, confusion, or motility abnormalities in a mammal comprising administering the genetically engineered myeloid cells or mesenchymal cells.

[0091] The genetically engineered myeloid cells or mesenchymal cells can be administered to a mammal by various routes including, but not limited to, subcutaneous, intramuscular, intradermal, intraperitoneal, intrathecal, intravenous, intracerebroventricular, and intratumoral. In aspects, the genetically engineered myeloid cells or mesenchymal cells can be directly administered (e.g., locally administered) by direct injection into the cancerous lesion or tumor. When multiple administrations are given, the administrations can be at one or more sites in a host and a single dose can be administered by dividing the single dose into equal portions for administration at one, two, three, four or more sites on the mammal.

[0092] Preferably, the cells are administered by injection, e.g., intravenously or intraperitoneally. The pharmaceutically acceptable carrier for the cells for injection may include any isotonic carrier such as, for example, normal saline (about 0.90% w/v of NaCl in water, about 300 mOsm/L NaCl in water, or about 9.0 g NaCl per liter of water), NORMOSOL R electrolyte solution (Abbott, Chicago, IL), PLASMA-LYTE A (Baxter, Deerfield, IL), about 5% dextrose in water, or Ringer's lactate. In aspects, the pharmaceutically acceptable carrier is supplemented with human serum albumen.

[0093] In aspects the disclosure provides a method of treatment that includes administering a genetically engineered myeloid cells or mesenchymal cells that have been cryopreserved and thawed. Any suitable means of cryopreserving and thawing the genetically engineered myeloid cells or mesenchymal cell products can be used. In aspects cells can be cryopreserved in a 1:1 solution of Plasma-Lyte and CryoStor® CS10 freezing media immediately following mRNA electroporation or other modification with a vector. In aspects the cryopreservation solution can be Bambanker® or Stem-Cellbanker®

[0094] The mammal referred to herein can be any mammal. As used herein, the term “mammal” refers to any mammal, including, but not limited to, mammals of the order Rodentia, such as mice and hamsters, and mammals of the order Logomorpha, such as rabbits. The mammals may be from the order Carnivora, including Felines (cats) and Canines (dogs). The mammals may be from the order Artiodactyla, including Bovines (cows) and Swines (pigs) or of the order Perssodactyla, including Equines (horses). The mammals may be of the order Primates, Ceboids, or Simoids (monkeys) or of the order Anthropoids (humans and apes). Preferably, the mammal is a human.

[0095] The International Pat. App. No. PCT/US2020/017515 and its publication as WO 2020/163868 are incorporated by reference herein in its entirety.

[0096] The following are exemplary GEMys.

[0097] mIL12 GEMys: IL12 is a cytokine produced by myeloid cells including macrophages, monocytes, dendritic cells that is known as T cell stimulating factor. It can help skew naïve T cells into Th1 T cells during activation. It also activates NK cells. It stimulates the production of IFNg from T cells and NK cells and reduces IL4 suppression of IFNg production. The introduction of IL. 12 tethered to the membrane (mII. 12) of myeloid cell allows for presentation of the cytokine on the cell surface to T cells expressing IL12 receptor. IL12 receptor binding to this membrane tethered IL12 GEMy (mIL12 GEMy) results in downstream signaling through Stat1 and Stat3 from JAK1, JNK1/2, Akt, Tyk2, ERK1/2 signaling which skews to an M1 phenotype and is similar to activation in response to TLR stimulation. In other aspects, the membrane tethered IL12 can include but is not limited to the membrane portion of PDL1, CD80, a subunit of the IL-26 receptor, IL20RA, IL10RB, GCSFR, GMCSFR, LRP5. The signaling domains can include but not limited to no intracellular signaling domain, JAK/Stat signaling domains, or Src and Syk/Zap70 signaling domains, TLR4 signaling domains, MyD88 signaling domain, TIRAP signaling domain, TRAM signaling domain, TRIF signaling domain, CD40 signaling domain. In aspects, mIL12 GEMys can be engineered to be inducible.

[0098] IL12 GEMys: IL12 is a cytokine produced by myeloid cells including macrophages, monocytes, dendritic cells that is known as T cell stimulating factor. It can help skew naïve T cells into Th1 T cells during activation. It also activates NK cells. It stimulates the production of IFNg from T cells and NK cells and reduces IL4 suppression of IFNg production. In other aspects, the secreted IL12 signaling domains can include but are not limited to no intracellular signaling domain, JAK/Stat signaling domains, or Src and Syk/Zap70 signaling domains, TLR4 signaling domains, MyD88 signaling domain, TIRAP signaling domain, TRAM signaling domain, TRIF signaling domain, CD40 signaling domain. In aspects, IL12 GEMys can be engineered to be inducible.

[0099] IL6DR-GEMys: Interleukin 6 (IL6) is a pro-inflammatory cytokine and an anti-inflammatory myokine. Monocytes and macrophages produce IL6 in response to pathogen-associated molecular patterns to mediate fever and acute phase response during infection. IL6 is a known growth factor for hematopoietic progenitor cells and induces neutrophil mobilization from the bone marrow. Its role in breaking tumor dormancy and its association with cancer progression in breast, prostate and other cancers is well-established. IL6 is also known to play a role in COVID19 and other viruses that induce inflammatory response associated with worse outcomes. The introduction of a IL6 decoy receptor (IL6DR)-GEMys allows for low level, localized blockade of IL6 compared to systemic monoclonal antibody treatment. A synthetic decoy receptor can offer the advantage of locally limiting IL6 in a myeloid rich environment. In aspects, the IL6 decoy receptors are modified so they cannot bind GP130 to provide a means of sequestering secreted IL6 in the microenvironment without activating cells through GP130 trans-signaling. In aspects IL6DR GEMys can be engineered to be inducible.

[0100] sTREM2 GEMys: A cargo protein with a role in both central nervous system solid tumor malignancies, as well as potentially neurodegenerative diseases, is Triggering Receptor expressed on Myeloid cells 2 (TREM2), which is a protein expressed on the cell surface of myeloid cells. TREM2 has an intracellular and an extracellular domain. The intracellular domain can signal through DAP12 and the extracellular domain can be cleaved by a disintegrin and metalloproteinase (ADAM) 10/17 that leads to release of a soluble TREM2 (sTREM2). When the extracellular domain is cleaved, the intracellular domain signals intracellularly and induces immune suppressive signals in the cell. TREM2 blockade may limit cancer progression and could inhibit Alzheimer's pathology. A soluble TREM2 receptor decoy (sTREM2) can be created that does not have the intracellular domain, which would not induce intracellular signaling and immune suppression, and is trafficked to the membrane for secretion, acting as a sink and inhibitor of TREM2 signaling in the local microenvironment. sTREM2 GEMys can inhibit TREM2 signaling and could limit cancer progression and metastatic progression and potentially improve neurodegenerative diseases. In aspects sTREM2 GEMys can improve efficacy of T cell mediated immunotherapy by limiting myeloid mediated immunosuppression of adaptive immunity. In aspects sTREM2 GEMys can be engineered to be inducible.

[0101] TIMP3-GEMys: Tissue inhibitors of metalloproteinases (TIMPs) inhibit metalloproteinases (MMPs) enzymes that can degrade extracellular matrix components. TIMPs can also inhibit a disintegrin and metalloproteinases (ADAMs). In particular, TIMP3 can inhibit both ADAM10 and ADAM17, unlike TIMP1, which only inhibits ADAM10 and not ADAM17. Since both ADAM10 and ADAM17 play roles in cleaving TREM2 to become sTREM2 and also induce myeloid specific immune suppression, sTREM2 decoy receptor-GEMys in combination with TIMP3-GEMys are contemplated to limit endogenous TREM2 cleavage by ADAM10 and ADAM17 and decrease myeloid-mediated immune suppression. In aspects TIMP3-GEMys can be engineered to be inducible.

[0102] Dominant negative TGFβRII or TGFβRIII GEMys: A dominant negative TGFβRII or TGFβRIII can act as a sink for TGFβ. TGFβ is known to inhibit T cell cytotoxicity and induce myeloid mediated immune suppression and many other pleotropic effects in the TME and in different tumor settings. Delivering a TGFβRII or TGFβRIII decoy locally via GEMys could reduce toxicity and improve efficacy by limiting TGFβ in the localized TME. In aspects a dominant negative TGFβRII or TGFβRIII GEMys can be engineered to be inducible.

[0103] EP2 agonist GEMys and EP2 decoy receptor GEMys: EP2 is a prostaglandin receptor for prostaglandin E2 (PGE2). PGE2 signaling is a major modulator of inflammation and is commonly elevated during inflammatory disease processes. PGE2 is a downstream product of the cyclooxygenase 2 (COX-2) pathway. As they age, myeloid cells demonstrate increased PGE2 synthesis, and this aging phenotype also occurs similarly in the cancer setting. Myeloid-derived suppressor cells (MDSCs), which are elevated in the cancer setting in blood and the earliest metastatic microenvironment, have marked increased PGE2 expression, leading to altered glucose metabolism and bioenergetics in these cells. EP2 decoy receptor GEMys (EP2DR-GEMys) can be developed to block PGE2 signaling in macrophages as EP2 has been shown to induce myeloid cell dysfunction, and blocking EP2 restores metabolic fitness to aging myeloid cells, MDSCs, and damaged macrophages. Targeting PGE2 signaling can reverse disease associated processes including metastatic progression, memory loss and other age- and disease-related dysfunction. Use of EP2 decoy receptor GEMys are contemplated to restore a metabolically-fit myeloid compartment for treating cancer and other diseases. Further, EP2-producing GEMys that have EP2 deleted by CRISPR may promote bone development and reduced risk of fractures in patients with osteoporosis. GEMys with EP2 inactivated by CRISPR in order to eliminate EP2 receptor signaling is contemplated to promote metabolic fitness and longevity in these therapeutic engineered myeloid cells. In aspects EP2 agonist GEMys and EP2 decoy receptor GEMys can be engineered to be inducible.

[0104] In aspects the protein encoded by the mRNAs for IL12 comprises SEQ ID NO: 59, for IL6DR comprises SEQ ID NO: 60, for sTREM2 comprises SEQ ID NO: 61, human CD40L comprises SEQ ID NO: 62, for SIV Vpx comprises SEQ ID NO: 63, for human tEGFR-IL12 comprises SEQ ID NO: 65, for human tEFGR-sTREM2 comprises SEQ ID NO: 67, for murine CD40L comprises SEQ ID NO: 69. In aspects the protein encoded by the transgene IL-1RA comprises SEQ ID NO: 70. In aspects the cDNA used to create human tEFGR-sTREM2 mRNA comprises SEQ ID NO: 66.

[0105] The table below (Table 1) presents examples of genes as described herein.

TABLE 1

| Gene | Reference |
|---|---|
| Sp107 | SEQ ID NO: 19 of U.S. Pat. No. 7,709,625 |
| Sp144 | SEQ ID NO: 20 of U.S. Pat. No. 7,709,625 |
| Gene | GenBank/Other Reference |
| IL12A | BC104984.1 |
| IL12B | BC074723.2 |
| CXCL9 | BC095396.1 |
| CXCL10 | BC010954.1 |
| IL10 | CR541993.1 |
| SMAD4 | NCBI Reference Sequence: NM_005359.6 |
| TGFB1 | NCBI Reference Sequence: NM_000660.7 |
| TGFB2 | BC096235.4 |
| TGFB3 | EF560714.1 |
| IL2 | NCBI Reference Sequence: NM_000586.4 |
| TREM1 | AY074783.1 |
| TREM2 | BC032362.1 |
| CD2AP | BC069444.1 |
| GPR32 | BC095544.1 |
| FPR2 | M88107.1 |
| P2RY2 | AY136753.1 |
| P2RY6 | AF498920.1 |
| CHEMR23 | BC106927.2 |
| ERV3-2 | CH236950.1 (Gene ID: 57612) |
| HERV-W | NCBI Reference Sequence: NM_014590.4 |
| | (Gene ID: 30816) |
| HERV-K | NCBI Reference Sequence: NC_022518.1 |
| | and GenBank: AF020092.1 |
| GPR18 | BC066927.1 |
| GPR37 | NCBI Reference Sequence: NM_005302.5 |
| LGR6 | AF190501.1 |
| Gene | Gene ID |
| S100A8 | 6279 |
| S100A9 | 6280 |
| ARG1 | 383 |
| IDO1 | 3620 |
| IL4 | 3565 |
| TGFB1 | 7040 |
| TGFB2 | 7042 |
| TGFB3 | 7043 |
| ADAM17 | 6868 |
| ENTPD1 (CD39) | 953 |
| NT5E (CD73) | 4907 |
| CYBB | 1536 |
| BACE1 | 23621 |
| NCKAP1L | 3071 |
| PTGER2 (EP2) | 5732 |

[0106] The following are certain aspects of the disclosure.

[0107] 1. A myeloid cell or mesenchymal cell comprising exogenous mRNA, wherein the exogenous mRNA encodes IL12, membrane tethered IL12 (mIL12), a IL6 decoy receptor (IL6DR), CD40 Ligand (CD40L), a soluble Triggering Receptor expressed on Myeloid cells 2 decoy receptor (sTREM2), a tissue inhibitor of metalloproteinases (TIMPs), a dominant negative transforming growth factor β receptor II (TGFβRII), a dominant negative transforming growth factor β receptor III (TGFβRIII), or a prostaglandin E2 receptor 2 decoy receptor (EP2DR).

[0108] 2. The myeloid cell or mesenchymal cell of aspect 1, wherein the cell is a myeloid cell and the myeloid cell is differentiated from a hematopoietic stem and progenitor cell (HSPC).

[0109] 3. The myeloid cell or mesenchymal cell of aspect 1, wherein the cell is a myeloid cell and the myeloid cell is a genetically modified CD34+ bone marrow-derived CXCR4+ myeloid cell.

[0110] 4. The myeloid cell or mesenchymal cell of any one of aspects 1-3, wherein cDNA is used to create the exogenous mRNA, the cDNA encoding IL12 comprising the sequence of SEQ ID NO: 2, IL6DR comprising the sequence of SEQ ID NO: 3, CD40L comprising the sequence of SEQ ID NO: 4, and sTREM2 comprising the sequence of SEQ ID NO: 5.

[0111] 5. The myeloid cell or mesenchymal cell of any one of aspects 1-4, wherein the exogenous mRNA comprises a 3′ UTR and cDNA is used to create the 3′ UTR, the cDNA comprising the sequence of any one of SEQ ID NOs: 10-16.

[0112] 6. The myeloid cell or mesenchymal cell of any one of aspects 1-5, wherein the myeloid cell or mesenchymal cell comprises a vector.

[0113] 7. The myeloid cell or mesenchymal cell of aspect 6, wherein the vector is a plasmid vector, a yeast vector, or a viral vector.

[0114] 8. The myeloid cell or mesenchymal cell of aspect 6 or 7, wherein the vector is a lentiviral vector.

[0115] 9. The myeloid cell or mesenchymal cell of any one of aspects 6-8, wherein the vector comprises a transgene.

[0116] 10. The myeloid cell or mesenchymal cell of aspect 9, wherein the vector comprises an expression control sequence operatively linked to the transgene.

[0117] 11. The myeloid cell or mesenchymal cell of aspect 10, wherein the expression control sequence is a promoter.

[0118] 12. The myeloid cell or mesenchymal cell of aspect 11, wherein the promoter is a hVMD2 promoter, SV40 early promoter, RSV promoter, adenovirus major late promoter, human CMV immediate early I promoter, poxvirus promoter, 30K promoter, I3 promoter, sE/L promoter, 7.5K promoter, 40K promoter, C1 promoter, EF-1a promoter, sp107 promoter, sp144 promoter, MMP14 promoter, sp107 and MMP14 combination promoter, or sp114 and MMP14 combination promoter.

[0119] 13. The myeloid cell or mesenchymal cell of aspect 12, wherein the sp107 promoter comprises SEQ ID NO: 13, the sp 144 promoter comprises SEQ ID NO: 14, the MMP14 promoter comprises SEQ ID NO: 15, the sp107 and MMP14 combination promoter comprises SEQ ID NO: 16, and the sp114 and MMP14 combination promoter comprises SEQ ID NO: 17.

[0120] 14. The myeloid cell or mesenchymal cell of any one of aspects 9-13, wherein the transgene encodes a cytokine, a chemokine, an enzyme, a substrate, a receptor decoy, an antibody, or a gene of a suicide gene system.

[0121] 15. The myeloid cell or mesenchymal cell of aspect 14, wherein the transgene encodes an enzyme, wherein the enzyme is hyaluronidase.

[0122] 16. The myeloid cell or mesenchymal cell of aspect 14, wherein the transgene encodes a gene of a suicide gene system, wherein the suicide gene system is a Herpes Simplex Virus Thymidine Kinase (HSVTK)/Ganciclovir (GCV) suicide gene system or an inducible Caspase suicide gene system.

[0123] 17. The myeloid cell or mesenchymal cell of any one of aspects 9-13, wherein the transgene encodes IL-IRA (e.g., SEQ ID NO: 18), IL-2 (e.g., SEQ ID NO: 19), IL-10 (e.g., SEQ ID NO: 20), IL-12A (e.g., SEQ ID NO: 21), IL-12B (e.g., SEQ ID NO: 22), CXCL9 (e.g., SEQ ID NO: 23), CXCL10 (e.g., SEQ ID NO: 24), SMAD4 (e.g., SEQ ID NO: 25), TGFβ1 (e.g., SEQ ID NO: 26), TGFβ2 (e.g., SEQ ID NO: 27), TGFβ3 (e.g., SEQ ID NO: 28), TREM1 (e.g., SEQ ID NO: 29), sTREM2 (e.g., SEQ ID NO: 5), CD2AP (e.g., SEQ ID NO: 31), FPR2 (e.g., SEQ ID NO: 32), P2RY2 (e.g., SEQ ID NO: 33), P2RY6 (e.g., SEQ ID NO: 34), CHEMR23 (e.g., SEQ ID NO: 35), ERV3-2 (e.g., SEQ ID NO: 36), HERV-W (e.g., SEQ ID NO: 37), HERV-K (e.g., SEQ ID NO: 38), GPR18 (e.g., SEQ ID NO: 39), GPR32 (e.g., SEQ ID NO: 40), GPR37 (e.g., SEQ ID NO: 41), or LGR6 (e.g., SEQ ID NO: 42).

[0124] 18. The myeloid cell or mesenchymal cell of any one of aspects 9-17, wherein the transgene is inducible.

[0125] 19. The myeloid cell or mesenchymal cell of any one of aspects 9-18, wherein the transgene encodes a gene of a inducible gene system, wherein the inducible gene system is a doxorubicin or FK506 binding protein 12 (FKBP) destabilizing domain or protease inducible system.

[0126] 20. The myeloid cell or mesenchymal cell of aspect 15 or 16, wherein the vector comprises an additional transgene, wherein the additional transgene encodes IL-IRA (e.g., SEQ ID NO: 18), IL-2 (e.g., SEQ ID NO: 19), IL-10 (e.g., SEQ ID NO: 20), IL-12A (e.g., SEQ ID NO: 21), IL-12B (e.g., SEQ ID NO: 22), CXCL9 (e.g., SEQ ID NO: 23), CXCL10 (e.g., SEQ ID NO: 24), SMAD4 (e.g., SEQ ID NO: 25), TGFβ1 (e.g., SEQ ID NO: 26), TGFβ2 (e.g., SEQ ID NO: 27), TGFβ3 (e.g., SEQ ID NO: 28), TREM1 (e.g., SEQ ID NO: 29), sTREM2 (e.g., SEQ ID NO: 5), CD2AP (e.g., SEQ ID NO: 31), FPR2 (e.g., SEQ ID NO: 32), P2RY2 (e.g., SEQ ID NO: 33), P2RY6 (e.g., SEQ ID NO: 34), CHEMR23 (e.g., SEQ ID NO: 35), ERV3-2 (e.g., SEQ ID NO: 36), HERV-W (e.g., SEQ ID NO: 37), HERV-K (e.g., SEQ ID NO: 38), GPR18 (e.g., SEQ ID NO: 39), GPR32 (e.g., SEQ ID NO: 40), GPR37 (e.g., SEQ ID NO: 41), or LGR6 (e.g., SEQ ID NO: 42).

[0127] 21. The myeloid cell or mesenchymal cell of any one of aspects 6-20, wherein the vector comprises a reporter gene.

[0128] 22. The myeloid cell or mesenchymal cell of aspect 21, wherein the reporter gene is EGFR, tEGFR, or CD90.1.

[0129] 23. A method of making a myeloid cell or mesenchymal cell that expresses a protein, the method comprising introducing to the myeloid cell or mesenchymal cell an mRNA encoding IL12, membrane tethered IL12 (mIL12), a IL6 decoy receptor (IL6DR), CD40 Ligand (CD40L), a soluble Triggering Receptor expressed on Myeloid cells 2 decoy receptor (sTREM2), a tissue inhibitor of metalloproteinases (TIMPs), a dominant negative transforming growth factor β receptor II (TGFβRII), a dominant negative transforming growth factor β receptor III (TGFβRIII), or a prostaglandin E2 receptor 2 decoy receptor (EP2 decoy receptor).

[0130] 24. The method of aspect 23, wherein cDNA is used to create the exogenous mRNA, the cDNA encoding IL12 comprising the sequence of SEQ ID NO: 2, IL6DR comprising the sequence of SEQ ID NO: 3, CD40L comprising the sequence of SEQ ID NO: 4, and sTREM2 comprising the sequence of SEQ ID NO: 6.

[0131] 25. The method of aspect 23 or 24, wherein the exogenous mRNA comprises a 3′ UTR and cDNA is used to create the 3′ UTR, the cDNA comprising the sequence of any one of SEQ ID NOs: 10-16.

[0132] 26. The method of any one of aspects 23-25, wherein the introduction of the mRNA is through electroporation, liposomes, or microfluidic squeezing.

[0133] 27. A myeloid cell or mesenchymal cell comprising exogenous mRNA, wherein the exogenous mRNA encodes viral accessory protein x (Vpx).

[0134] 28. The myeloid cell or mesenchymal cell of aspect 27, wherein the cell is a myeloid cell and the myeloid cell is differentiated from a hematopoietic stem and progenitor cell (HSPC) which can be CD34+.

[0135] 29. The myeloid cell or mesenchymal cell of aspect 27, wherein the cell is a myeloid cell and the myeloid cell is a genetically modified bone marrow-derived CXCR4⁺ myeloid cell.

[0136] 30. The myeloid cell or mesenchymal cell of any one of aspects 27-29, wherein cDNA is used to create the exogenous mRNA encoding Vpx, the cDNA comprising the sequence of SEQ ID NO: 43.

[0137] 31. The myeloid cell or mesenchymal cell of any one of aspects 27-30, wherein the exogenous mRNA comprises a 3′ UTR and cDNA is used to create the 3′ UTR, the cDNA comprising the sequence of any one of SEQ ID NOs: 10-16.

[0138] 32. A method of making a myeloid cell that expresses a protein, the method comprising introducing to the myeloid cell an mRNA encoding viral accessory protein x (Vpx).

[0139] 33. The method of aspect 32, wherein the exogenous mRNA comprises a 3′ UTR and cDNA is used to create the 3′ UTR, the cDNA comprising the sequence of any one of SEQ ID NOs: 10-16.

[0140] 34. The method of aspect 32 or 33, wherein the introduction of the mRNA is through electroporation, liposomes, or microfluidic squeezing.

[0141] 35. A method of genetically modifying a myeloid cell or mesenchymal cell, the method comprising
[0142] (a) introducing to the cell an mRNA encoding viral accessory protein x (Vpx), and
[0143] (b) transducing the cell with a vector.

[0144] 36. The method of aspect 35, wherein the introduction of the mRNA is through electroporation, liposomes, or microfluidic squeezing.

[0145] 37. The method of aspect 35 or 36, wherein cDNA is used to create the exogenous mRNA encoding Vpx, the cDNA comprising the sequence of SEQ ID NO: 43.

[0146] 38. The method of any one of aspects 35-37, wherein the exogenous mRNA comprises a 3′ UTR and cDNA is used to create the 3′ UTR, the cDNA comprising the sequence of any one of SEQ ID NOs: 10-16.

[0147] 39. A myeloid cell or mesenchymal cell, wherein the cell has been genetically modified to inactivate, knockdown, or remove S100A8 (e.g., SEQ ID NO: 44), S100A9 (e.g., SEQ ID NO: 45), ARG1 (e.g., SEQ ID NO: 46), IDO1 (e.g., SEQ ID NO: 47), IL4 (e.g., SEQ ID NO: 48), TGFβ1 (e.g., SEQ ID NO: 49), TGFβ2 (e.g., SEQ ID NO: 50), TGFβ3 (e.g., SEQ ID NO: 51), ADAM17 (e.g., SEQ ID NO: 52), CD39 (e.g., SEQ ID NO: 53), CD73 (e.g., SEQ ID NO: 54), CD274, CYBB/gp91phox/NOX2 (e.g., SEQ ID NO: 55), BACE1 (e.g., SEQ ID NO: 56), NCKAP1L (e.g., SEQ ID NO: 57), TREM2 (e.g., SEQ ID NO: 30), EP2 (e.g., SEQ ID NO: 58), IL12A (e.g., SEQ ID NO: 21), IL12B (e.g., SEQ ID NO: 22), or TNFA.

[0148] 40. A method of making a genetically modified myeloid cell or mesenchymal cell, the method comprising using CRISPR to inactivate, knockdown, or remove S100A8 (e.g., SEQ ID NO: 44), S100A9 (e.g., SEQ ID NO: 45), ARG1 (e.g., SEQ ID NO: 46), IDO1 (e.g., SEQ ID NO: 47), IL4 (e.g., SEQ ID NO: 48), TGFβ1 (e.g., SEQ ID NO: 49), TGFβ2 (e.g., SEQ ID NO: 50), TGFβ3 (e.g., SEQ ID NO: 51), ADAM17 (e.g., SEQ ID NO: 52), CD39 (e.g., SEQ ID NO: 53), CD73 (e.g., SEQ ID NO: 54), CD274, CYBB/gp91phox/NOX2 (e.g., SEQ ID NO: 55), BACE1 (e.g., SEQ ID NO: 56), NCKAP1L (e.g., SEQ ID NO: 57), TREM2 (e.g., SEQ ID NO: 30), EP2 (e.g., SEQ ID NO: 58), IL12A (e.g., SEQ ID NO: 21), IL12B (e.g., SEQ ID NO: 22), or TNFA.

[0149] 41. A method of treating a mammal having a tumor, the method comprising administering to the mammal a therapeutically effective amount of (a) a myeloid cell or mesenchymal cell of any one of aspects 1-22, 27-31, and 39 or (b) a myeloid cell or mesenchymal cell produced by the method of any one of aspects 23-26, 32-38, and 40.

[0150] 42. The method of aspect 41, wherein the myeloid cell or mesenchymal cell is cryopreserved and thawed before administration.

[0151] 43. The method of aspect 42 or 43, wherein the tumor is a brain tumor, a pancreatic adenocarcinoma, or an osteosarcoma.

[0152] 44. A method of treating a mammal having a neurodegenerative condition, an autoimmune disorder, or an inflammatory disorder, the method comprising administering to the mammal a therapeutically effective amount of (a) a myeloid cell or mesenchymal cell of any one of aspects 1-22, 27-31, and 39 or (b) a myeloid cell or mesenchymal cell produced by the method of any one of aspects 23-26, 32-38, and 40.

[0153] 45. The method of aspect 44, wherein the myeloid cell or mesenchymal cell is cryopreserved and thawed before administration.

[0154] 46. A method of treating a mammal having a cancer, the method comprising administering to the mammal a therapeutically effective amount of (a) a myeloid cell or mesenchymal cell of any one of aspects 1-22, 27-31, and 39 or (b) a myeloid cell or mesenchymal cell produced by the method of any one of aspects 23-26, 32-38, and 40.

[0155] 47. The method of aspect 46, wherein the myeloid cell or mesenchymal cell is cryopreserved and thawed before administration.

[0156] 48. The method of aspect 46 or 47, wherein the method further comprises administering an additional therapeutic treatment, wherein the additional therapeutic treatment comprising chemotherapy, surgical resection of a tumor, treatment with targeted cancer therapy, allogeneic or autologous stem cell transplantation, T cell adoptive transfer, chimeric antigen receptor (CAR)-modified T cells, T cell receptor (TCR)-modified T cells, a dendritic cell vaccine, an oncolytic virus, a small molecule, a monoclonal antibody or antigen binding fragments thereof, hormone-blocking therapy, radiation therapy, other immunotherapies, or myeloid-targeting pre-conditioning regimens optionally comprising clodronate or CSF1R inhibitors.

[0157] 49. The method of aspect 48, wherein the additional therapeutic treatment is chimeric antigen receptor (CAR)-modified T cells.

[0158] 50. A nucleotide sequence for a 3′ UTR that improves the stability of a mRNA sequence, wherein cDNA is used to create the 3′ UTR sequence, and the cDNA comprises the sequence of KJ1 (SEQ ID NO: 6), mtRNR1-KJ1 (SEQ ID NO: 7), mtRNR1-AES-KJ1 (SEQ ID NO: 8), KJ2 (SEQ ID NO: 9), mtRNR1-KJ2 (SEQ ID NO: 10), mtRNR1-AES-KJ2 (SEQ ID NO: 11), or KJ3 (SEQ ID NO: 12).

[0159] It shall be noted that the preceding are merely examples of aspects of the disclosure. Other exemplary aspects are apparent from the entirety of the description herein. It will also be understood by one of ordinary skill in the art that each of these aspects may be used in various combinations with the other aspects provided herein.

[0160] The following examples further illustrate the disclosure but, of course, should not be construed as in any way limiting its scope.

### Example 1

[0161] This example demonstrates expression of mRNA-encoded cargo in human genetically engineered myeloid cells (GEMys).

[0162] In solid tumors, immunotherapeutic strategies have been limited by the ability of T cells to penetrate deep into tumors and to persist, due to suppression by myeloid cells accumulating in tumor microenvironment (TME). Myeloid cells are part of the innate immune system and are multifunctional. They can be directly cytotoxic, capable of antigen presentation and efficient at tissue repair. During repair, these cells dampen immune response to prevent immune-mediated tissue damage. These cells are the first responders to damaged tissue sites and the most abundant cell in the tumor microenvironment.

[0163] Primary human monocytes from healthy donors were electroporated without mRNA (blank), GFP mRNA, human single chain IL12 mRNA, and tEGFR-IL12 mRNA (wherein the cDNA used to create the mRNA comprises SEQ ID NO: 64), using the Maxcyte electroporation device. Electroporated cells were treated with protein transport inhibitors (brefeldin A and monensin) immediately after electroporation for 14 hours. Cells were fixed, permeabilized, and intracellular staining for IL-12 was performed. Data was analyzed for EGFR, GFP, and IL12 expression by flow cytometry.

[0164] Flow cytometry analysis showed that EGFR mRNA electroporation increased the expression levels of EGFR mRNA in primary human monocytes over the following 20 hours (FIG. 1A). In comparison primary human monocytes that underwent no electroporation treatment or electroporation treatment without mRNA (blank) did not show a comparable increase in EGFR expression (FIG. 1B). Similar results were observed with IL12 expression levels which increased in primary human monocytes that were electroporated with IL12 mRNA, while those cells that were not electroporated or electroporated without mRNA (blank) or GFP mRNA show no increase in IL12 expression levels (FIG. 2 and FIG. 3). Primary human monocytes that underwent electroporation with GFP mRNA showed increased GFP expression relative to those cells that were not electroporated or electroporated with IL12 mRNA (FIG. 3).

[0165] RT-PCR analysis measuring IL12 expression levels normalized to hypoxanthine-guanine phosphoribosyltransferase (HPRT1) showed increased expression in primary human monocytes electroporated with IL12 mRNA relative to those electroporated without mRNA (blank) over the following 24 hours (FIG. 4). IL12 mRNA levels appeared to peak around 5 hours after electroporation and continued to decrease until none were detected at approximately 24 hours after electroporation. ELISA analysis showed similar results with increased IL12 protein levels in primary human monocytes electroporated with IL12 mRNA relative to those electroporated with blank mRNA (blank) over the following 48 hours (FIG. 4). IL12 protein levels appeared to peak around 24 hours after electroporation and had decreased slightly by 48 hours after electroporation.

[0166] To test the ability of IL12-mRNA-GEMys to induce lymphocyte activation, mRNA electroporated monocytes (RO elutriation fraction) were co-cultured with donor-matched T cell lymphocytes. IFNγ production was measured by ELISA analysis at 24 hours in unstimulated T cells (Unstim), T cells alone, No EP RO+T cells, GFP RO+T cells, IL12 RO+T cells, No EP RO cells alone, GFP RO cells alone, and IL12 RO cells alone (FIG. 7). The unstimulated T cells, No EP RO cells alone, GFP RO cells alone, and IL12 RO cells alone showed no IFNγ protein, while T cells alone, No EP RO+T cells, and GFP RO+T cells showed low levels of IFNγ protein (approximately 200 μg/mL), while IL12 RO+T cells showed a high level of IFNγ protein (approximately 1300 μg/mL). Human myeloid cells engineered to express IL12 induced the most IFNg production by co-cultured T cells lymphocytes.

[0167] These results suggest that primary human monocytes electroporated with mRNA constructs will increase production of the protein encoded by the mRNA. These results also suggest that the protein is trafficked and functions normally in the cell. This suggests that GEMys can be successfully produced by such a method.

### Example 2

[0168] This example demonstrates introduction of Viral protein x (Vpx) mRNA into human monocytes, which improves lentiviral expression.

[0169] Stable expression of a gene product across an expanding population can require lentiviral transduction. However, transduction of myeloid cells with viral components for stable insertion of DNA into the cell's genome has proven challenging due to the increased presence of antiviral mechanisms in myeloid cells. Although myeloid cells can be transfected by, e.g., adenoviral vectors, the introduction of the adenoviral vector is a strong activator of the immune response and can skew the myeloid cell to an inflammatory phenotype as a result of an interferon response. Such activation of an immune response may not be desirable in certain disease settings and may lead to immune mediated removal of these engineered cells.

[0170] Primary human monocytes were not electroporated or electroporated with mRNA encoding the antiviral protein Vpx. After 24 hours, cells were transduced with lentivirus encoding human truncated EGFR (tEGFR) and IL-12. EGFR^{high} expression on the surface is shown as a readout of transduction efficiency 24 hours post-transduction (FIGS. 5A-5B). The primary human monocytes that were electroporated with Vpx mRNA showed increased expression of EGFR relative to those that were not electroporated (FIG. 5C). There is minimal lentiviral transduction of EGFR IL12 vector with only 7% expression of EGFR when transduced without Vpx. Without wishing to be bound by theory, it is believed that Vpx expression inhibits SAMHD1, a protein responsible for preventing efficient lentiviral integration into myeloid cells.

[0171] These results suggest that expression of Vpx in potential GEMys could increase expression of the cargo proteins introduced by subsequent lentiviral transduction.

### Example 3

[0172] This example demonstrates that mRNA-GEMys may be cryopreserved and still express mRNA after thawing, both in vitro and in vivo.

[0173] Human GEMys were prepared as in example 1. The human GEMys were then cryopreserved by resuspending the cell in Plasmalyte immediately following mRNA electroporation and adding one volume of CryoStor CS10 freezing media. Cells were frozen slowly at −80 C in a isopropanol bath and transferred to liquid nitrogen for extended storage. Cryopreserved GEMys were thawed in a 37C water bath followed by the addition of 1 mL pre-warmed culture media incubated for one minute, addition of 2 mL pre-warmed culture media for one minute, addition of 4 mL culture media for one minute, and then spun down and resuspended in culture media. ELISA analysis was then performed on fresh and thawed GEMys over the 24 hours following electroporation or thawing (FIG. 6). Both the fresh and thawed cryopreserved GEMys showed increasing IL12 protein levels for approximately 10 hours and showed comparable levels at 24 hours.

[0174] Fresh GFP-GEMys and IL12-GEMys were injected intravenously into osteosarcoma tumor-bearing NSG-SGM3 mice. The next day after GEMys injection, mice were sacrificed and spleen, bone marrow, lung and liver samples were extracted. These samples were digested and mechanically processed into single cell suspension and staining for human CD45 was performed and analyzed by flow cytometry. The lung tissue was also stained for human CD11b, CD33, CD15, and HLA-DR. Analysis of the tissue samples showed increased localization of the GEMys to the lung, liver, and spleen compared to the bone marrow (FIG. 8A). Phenotypic analysis showed that over 50% of the GEMys in the lung were CD11b, CD33, CD14 and HLDA-DR positive cells, while almost none were CD15 positive (FIG. 8B). The data demonstrate the tissue localization and the myeloid (CD11b+, CD33+, HLA-DR+) and classical monocyte (CD14+) cell phenotype of the human mRNA-engineered GEMys after administration in vivo in a mouse model.

[0175] Syngeneic M3-9-M Rhabdomyosarcoma tumor bearing C57/B16 mice were given no treatment, or treated by injection with Cy/Flu alone, Cy/Flu and freshly prepared Thy1.1 IL12 mRNA murine GEMys, or Cy/Flu and thawed cryopreserved Thy1.1 IL12 mRNA murine GEMys. The day after injection the mice were sacrificed and spleen, bone marrow, lung, liver, and tumor samples were extracted. These samples were flash frozen and analysed by ELISA for IL12 protein levels. The plasma samples with no treatment contained no detectable IL12, while the Cy/Flu, Cy/Flu and fresh GEMys, and Cy/Flu and cryopreserved GEMys had low but detectable amounts of IL12 protein, about 10 μg/mL, with one mouse in the cryopreserved GEMys group had around 80 μg/mL IL12 detected in the plasma (FIG. 9A). The lung samples from the Cy/Flu and fresh GEMys treatment and Cy/Flu and cryopreserved GEMys treatment had increased IL12 protein levels, about 400 pg/gram, compared to the treatment with Cy/Flu alone, about 300 pg/gram, or no treatment, about 200 pg/gram (FIG. 9B). Similarly, the spleen samples from the Cy/Flu and fresh GEMys treatment and Cy/Flu and cryopreserved GEMys treatment had increased IL12 protein levels, about 500 pg/gram, compared to the treatment with Cy/Flu alone, about 250 pg/gram, or no treatment, which was undetectable (FIG. 9C). The liver samples showed highly variable but similar levels of IL. 12 protein, about 260 pg/gram median among all treatments (FIG. 9D). The tumor samples showed higher levels of IL12 protein in the no treatment group, about 35 mg/mL, compared to the other treatment groups, which all had less than half as much IL12 protein (FIG. 9E). Elevated IL12 levels in the mice treated with IL12-mRNA-GEMys demonstrate the production of the IL12 from the mRNA in vivo after injection of these engineered cells into mice. The similar levels of IL12 protein levels among these tissue samples for the fresh and cryopreserved GEMys treatments suggest that cryopreserved GEMys function comparably to fresh GEMys in vivo which allows for administration of a cryopreserved GEMy product to allow for greater flexibility in timing and prevent cell loss that can occur with prolonged cell culture.

[0176] These results suggest that mRNA-GEMys may be cryopreserved and still maintain the ability to express mRNA after thawing in both in vitro and in vivo systems. This suggests that mRNA-GEMys could successfully be stored long term and thus be ready for use shortly after thawing.

### Example 4

[0177] This example demonstrates the preparation of CD40L-GEMys and use thereof for induction of functional CD40 signaling.

[0178] The early metastatic microenvironment is T cell poor. CD4⁺ T cells are decreased in this pro-tumorigenic environment. CD40L is found on the surface of T cells or soluble when cleaved from the immune cell surface, and it activates CD40 expressed on B cells and dendritic cells (DCs) to stimulate helper T cells and other immune cells. CD40L is expressed on helper T cells that do not traffic well to the interior TME.

[0179] CD40L-GEMys were developed to signal to CD40-expressing B cells and DCs to activate and aid in recruitment and activation of T cells to promote antitumor immunity. The cDNA used to create the murine CD40L mRNA comprises the sequence of SEQ ID NO: 68. In addition, CD40L can activate B cells by providing a helper T cell signal for germinal center formation, isotype class switching and production of immunoglobulin antibodies.

[0180] Murine bone marrow derived cells were either untransduced or transduced with Thy 1.1 mRNA or CD40 ligand (CD40L) lentivirus and differentiated into the GEMys product over 4 days in culture with SCF, IL-6, and FLT3L. These GEMys were cultured with either the CD40L reporter line, HEK-Blue™ CD40L, or splenocytes in a 1:1 ratio. Cells were then collected for analysis.

[0181] Flow cytometry analysis of CD40L protein levels showed that CD40L GEMys had higher levels of CD40L than either the untransduced or Thy1.1 GEMys samples (FIG. 10A). FIG. 10B shows the expression of CD40L mRNA in the CD40L GEMys.

[0182] To determine if the CD40L GEMys induced activation of CD40 signaling the induction of nuclear factor kappa-light-chain-enhancer of activated B cells (NF-κB) was measured in the HEK-Blue™ CD40L reporter cell line, which produce SEAP in response to CD40 signaling. QUANTI-Blue™ solution was then used to detect SEAP levels according to manufacturers instructions in the treated HEK-Blue™ CD40L cells and HEK-CD40 cells as a negative control. The HEK-Blue™ CD40L cells cultured with CD40L GEMys showed increased CD40 signaling compared to cells treated with the untransduced and Thy1.1 GEMys which showed similar levels to the HEK-CD40 control (FIG. 11). This suggests that CD40L GEMys are able to induce functional CD40 signaling.

[0183] To determine if CD40L GEMys can activate B cells and dendritic cells, splenocytes were co-cultured with either untransduced, Thy1.1, or CD40L GEMys and then staining for CD80, CD86, and MHCII was performed and analyzed by flow cytometry. The splenocytes treated with CD40L GEMys showed a significantly higher percent of CD80, CD86, and MHCII positive cells among the classical dendritic cells than those treated with untransduced or Thy1.1 GEMys (FIG. 12A). Similarly, splenocytes treated with CD40L GEMys showed a significantly higher percent of CD86 and MHCII positive cells among the B cells than those treated with untransduced or Thy1.1 GEMys, and while the trend held for CD80 positive cells as well the difference was only significant for untransduced GEMys (FIG. 12B). This suggests that CD40L GEMys are able to induce functional CD40 signaling and activate DCs and B cells.

[0184] These results suggest that CD40L GEMys could be an effective therapeutic to promote antitumor immunity.

### Example 5

[0185] This example demonstrates the preparation of sTREM2-GEMys and use thereof for antitumor immunity.

[0186] In the tumor microenvironment TREM2 intracellular signaling induces immune suppression and can contribute to tumor metastasis. A soluble TREM2 receptor decoy (sTREM2) could inhibit TREM2 signalling and limit tumor progression. This proposed mechanism is shown in FIG. 13.

[0187] GEMys cells were prepared as in Example 2, but using murine cells and human STREM2 mRNA. ELISA analysis for TREM2 was then performed on the media and cell lysate of untransduced (UTD) and sTREM2 transduced GEMys. The untransduced media and lysate showed no detectable levels of TREM2 protein while the sTREM2 GEMys showed detectable levels of TREM2 in both the media and cell lysate (FIG. 14).

[0188] To test the efficacy of sTREM2 GEMys for antitumor immunity, F4 osteosarcoma tumor bearing C57BL/6 mice were injected with Cy/Flu alone or in combination with sTREM2 GEMys and then probability of survival was measured to a humane endpoint (FIG. 15). sTREM2 GEMys injected mice had significantly increased probability of survival, living an average 88 days post F4 osteosarcoma cell injection as opposed to the average 59 days for mice not injected with sTREM2 GEMys.

[0189] To test the efficacy of sTREM2 GEMys in combination with chimeric antigen receptor T cells for antitumor immunity, NSG mice bearing midline glioma also known as diffuse intrinsic pontine glioma (DIPG) were treated as shown in the experimental design of FIG. 16A. These DIPG bearing NSG mice were given either a mock treatment, or treated by a intracerebroventricular administration of: sTREM2 GEMy alone at Day 0, GD2 CART alone at Day 7, a combination of sTREM2 GEMys with subtherapeutic dosing of GD2 CART given together at Day 7, or a combination of sTREM2 GEMys given at Day 0 and GD2 CART given at Day 7 (FIG. 16B). The treatments consisting of a combination of sTREM2 GEMy and GD2 CART showed the most effective antitumor immunity. The sTREM2 GEMy and GD2 CART combination administered at the same time, Day 7, even showed no more tumor measurable (dashed line) at Day 28. Without wishing to be bound by theory, the proposed mechanism by which sTREM2 in combination with immunotherapy alleviates myeloid mediated immune suppression to improve anti-tumor T cell efficacy, which allows for either decreased dosing or improved efficacy with standard dosing is shown in FIG. 16C.

[0190] These results suggest that sTREM2 GEMys could be an effective therapeutic alone or in combination with other immunotherapies to promote antitumor immunity.

### Example 6

[0191] This example demonstrates myeloid specific promoters limit expression of cargo to the myeloid cell compartment.

[0192] Myeloid specific synthetic promoters have been developed to enhance cargo expression in myeloid cells by lentiviral vectors, either in differentiated monocytes or for transduction of CD34+ hematopoietic stem and progenitor cells. This is to ensure expression of a cargo protein is restricted to myeloid populations and not expressed significantly in immature hematopoietic populations.

[0193] Several truncated promoters from myeloid specific transcription factors have been developed to use for effective expression of a downstream sequence to result in protein expression in myeloid cells. Myeloid synthetic promoters have been created with truncated components of myeloid promoters such as Pu1 and C/EBPa.

[0194] A myeloid specific synthetic promoter has been developed based on highest expression in bone marrow-derived myeloid cells and primary human monocytes that home to tissue specific sites and drive expression of a protein of interest. The expression of desired cargo proteins can be restricted to myeloid cells with improved expression in myeloid cells by using the myeloid specific synthetic promoter, which includes truncated myeloid specific transcription factor promoters SP1, Pu.1a, Pu.1b, C/EBPa, AP1, AML-1, and a mutated MMP14 promoter.

[0195] These results suggest that these promoters could be used to drive expression specific to myeloid cells and therefore be used to more effectively target tumors and promote antitumor immunity.

[0196] SC monocyte cell lines and primary human monocytes cultures were either untransduced or underwent treatment with a lentiviral vector with either a general promoter EF1a or myeloid specific promoters sp107, sp144, MMP14, combined sp107 and MMP14, or combined sp144 and MMP14 promoter sequences driving expression of a GFP reporter. The percent of GFP positive cells were analysed for each group In the SC monocyte cell lines both the sp107+MMP14 and sp144+MMP14 promoters showed increased expression over the myeloid specific promoters alone (FIG. 17). In the primary human monocyte culture the percent of GFP positive CD14 positive cells were comparable for the sp 144, combined sp107 and MMP14, or combined sp144 and MMP14 promoter sequences, about 40%, which was higher than either sp107 or MMP14 alone (FIG. 18).

[0197] All references, including publications, patent applications, and patents, cited herein are hereby incorporated by reference to the same extent as if each reference were individually and specifically indicated to be incorporated by reference and were set forth in its entirety herein.

[0198] The use of the terms “a” and “an” and “the” and “at least one” and similar referents in the context of describing the invention (especially in the context of the following claims) are to be construed to cover both the singular and the plural, unless otherwise indicated herein or clearly contradicted by context. The use of the term “at least one” followed by a list of one or more items (for example, “at least one of A and B”) is to be construed to mean one item selected from the listed items (A or B) or any combination of two or more of the listed items (A and B), unless otherwise indicated herein or clearly contradicted by context. The terms “comprising,” “having,” “including,” and “containing” are to be construed as open-ended terms (i.e., meaning “including, but not limited to,”) unless otherwise noted. Recitation of ranges of values herein are merely intended to serve as a shorthand method of referring individually to each separate value falling within the range, unless otherwise indicated herein, and each separate value is incorporated into the specification as if it were individually recited herein. All methods described herein can be performed in any suitable order unless otherwise indicated herein or otherwise clearly contradicted by context. The use of any and all examples, or exemplary language (e.g., “such as”) provided herein, is intended merely to better illuminate the invention and does not pose a limitation on the scope of the invention unless otherwise claimed. No language in the specification should be construed as indicating any non-claimed element as essential to the practice of the invention.

[0199] Preferred aspects of this invention are described herein, including the best mode known to the inventors for carrying out the invention. Variations of those preferred aspects may become apparent to those of ordinary skill in the art upon reading the foregoing description. The inventors expect skilled artisans to employ such variations as appropriate, and the inventors intend for the invention to be practiced otherwise than as specifically described herein. Accordingly, this invention includes all modifications and equivalents of the subject matter recited in the claims appended hereto as permitted by applicable law. Moreover, any combination of the above-described elements in all possible variations thereof is encompassed by the invention unless otherwise indicated herein or otherwise clearly contradicted by context.

1. A myeloid cell or mesenchymal cell comprising exogenous mRNA, wherein the exogenous mRNA encodes IL12, membrane tethered IL12 (mIL12), a IL6 decoy receptor (IL6DR), CD40 Ligand (CD40L), a soluble Triggering Receptor expressed on Myeloid cells 2 decoy receptor (sTREM2), a tissue inhibitor of metalloproteinases (TIMPs), a dominant negative transforming growth factor β receptor II (TGFβRII), a dominant negative transforming growth factor β receptor III (TGFβRIII), or a prostaglandin E2 receptor 2 decoy receptor (EP2DR).

2. The myeloid cell or mesenchymal cell of claim 1, wherein the cell is a myeloid cell and the myeloid cell is differentiated from a hematopoietic stem and progenitor cell (HSPC).

3. The myeloid cell or mesenchymal cell of claim 1, wherein the cell is a myeloid cell and the myeloid cell is a genetically modified CD34+ bone marrow-derived CXCR4+ myeloid cell.

4. The myeloid cell or mesenchymal cell of claim 1, wherein cDNA is used to create the exogenous mRNA, the cDNA encoding IL12 comprising the sequence of SEQ ID NO: 2, IL6DR comprising the sequence of SEQ ID NO: 3, CD40L comprising the sequence of SEQ ID NO: 4, and sTREM2 comprising the sequence of SEQ ID NO: 5.

5. The myeloid cell or mesenchymal cell of claim 1, wherein the exogenous mRNA comprises a 3′ UTR and cDNA is used to create the 3′ UTR, the cDNA comprising the sequence of any one of SEQ ID NOs: 10-16.

6. The myeloid cell or mesenchymal cell of claim 1, wherein the myeloid cell or mesenchymal cell comprises a vector.

7. The myeloid cell or mesenchymal cell of claim 6, wherein the vector is a plasmid vector, a yeast vector, or a viral vector.

8. The myeloid cell or mesenchymal cell of claim 6, wherein the vector is a lentiviral vector.

9. The myeloid cell or mesenchymal cell of claim 6, wherein the vector comprises a transgene.

10. The myeloid cell or mesenchymal cell of claim 9, wherein the vector comprises an expression control sequence operatively linked to the transgene.

11. The myeloid cell or mesenchymal cell of claim 10, wherein the expression control sequence is a promoter.

12. The myeloid cell or mesenchymal cell of claim 11, wherein the promoter is a hVMD2 promoter, SV40 early promoter, RSV promoter, adenovirus major late promoter, human CMV immediate early I promoter, poxvirus promoter, 30K promoter, I3 promoter, sE/L promoter, 7.5K promoter, 40K promoter, C1 promoter, EF-1a promoter, sp107 promoter, sp144 promoter, MMP14 promoter, sp107 and MMP14 combination promoter, or sp114 and MMP14 combination promoter.

13. The myeloid cell or mesenchymal cell of claim 12, wherein the sp107 promoter comprises SEQ ID NO: 13, the sp144 promoter comprises SEQ ID NO: 14, the MMP14 promoter comprises SEQ ID NO: 15, the sp107 and MMP14 combination promoter comprises SEQ ID NO: 16, and the sp114 and MMP14 combination promoter comprises SEQ ID NO: 17.

14. The myeloid cell or mesenchymal cell of claim 9, wherein the transgene encodes a cytokine, a chemokine, an enzyme, a substrate, a receptor decoy, an antibody, or a gene of a suicide gene system.

15. The myeloid cell or mesenchymal cell of claim 14, wherein the transgene encodes an enzyme, wherein the enzyme is hyaluronidase.

16. The myeloid cell or mesenchymal cell of claim 14, wherein the transgene encodes a gene of a suicide gene system, wherein the suicide gene system is a Herpes Simplex Virus Thymidine Kinase (HSVTK)/Ganciclovir (GCV) suicide gene system or an inducible Caspase suicide gene system.

17. The myeloid cell or mesenchymal cell of claim 9, wherein the transgene encodes IL-IRA (SEQ ID NO: 18), IL-2 (SEQ ID NO: 19), IL-10 (SEQ ID NO: 20), IL-12A (SEQ ID NO: 21), IL-12B (SEQ ID NO: 22), CXCL9 (SEQ ID NO: 23), CXCL10 (SEQ ID NO: 24), SMAD4 (SEQ ID NO: 25), TGFβ1 (SEQ ID NO: 26), TGFβ2 (SEQ ID NO: 27), TGFβ3 (SEQ ID NO: 28), TREM1 (SEQ ID NO: 29), sTREM2 (SEQ ID NO: 5), CD2AP (SEQ ID NO: 31), FPR2 (SEQ ID NO: 32), P2RY2 (SEQ ID NO: 33), P2RY6 (SEQ ID NO: 34), CHEMR23 (SEQ ID NO: 35), ERV3-2 (SEQ ID NO: 36), HERV-W (SEQ ID NO: 37), HERV-K (SEQ ID NO: 38), GPR18 (SEQ ID NO: 39), GPR32 (SEQ ID NO: 40), GPR37 (SEQ ID NO: 41), or LGR6 (SEQ ID NO: 42.

18. The myeloid cell or mesenchymal cell of claim 9, wherein the transgene is inducible.

19. The myeloid cell or mesenchymal cell of claim 9, wherein the transgene encodes a gene of an inducible gene system, wherein the inducible gene system is a doxorubicin or FK506 binding protein 12 (FKBP) destabilizing domain or protease inducible system.

20. The myeloid cell or mesenchymal cell of claim 15, wherein the vector comprises an additional transgene, wherein the additional transgene encodes IL-IRA (SEQ ID NO: 18), IL-2 (SEQ ID NO: 19), IL-10 (SEQ ID NO: 20), IL-12A (SEQ ID NO: 21), IL-12B (SEQ ID NO: 22), CXCL9 (SEQ ID NO: 23), CXCL10 (SEQ ID NO: 24), SMAD4 (SEQ ID NO: 25), TGFβ1 (SEQ ID NO: 26), TGFβ2 (SEQ ID NO: 27), TGFβ3 (SEQ ID NO: 28), TREM1 (SEQ ID NO: 29), sTREM2 (SEQ ID NO: 5), CD2AP (SEQ ID NO: 31), FPR2 (SEQ ID NO: 32), P2RY2 (SEQ ID NO: 33), P2RY6 (SEQ ID NO: 34, CHEMR23 (SEQ ID NO: 35), ERV3-2 (SEQ ID NO: 36), HERV-W (SEQ ID NO: 37), HERV-K (SEQ ID NO: 38), GPR18 (SEQ ID NO: 39), GPR32 (SEQ ID NO: 40), GPR37 (SEQ ID NO: 41), or LGR6 (SEQ ID NO: 42).

21. The myeloid cell or mesenchymal cell of claim 6, wherein the vector comprises a reporter gene.

22. The myeloid cell or mesenchymal cell of claim 21, wherein the reporter gene is EGFR, tEGFR, or CD90.1.

23-26. (canceled)

27. A myeloid cell or mesenchymal cell comprising exogenous mRNA, wherein the exogenous mRNA encodes viral accessory protein x (Vpx).

28-38. (canceled)

39. A myeloid cell or mesenchymal cell, wherein the cell has been genetically modified to inactivate, knockdown, or remove S100A8 (SEQ ID NO: 44), S100A9 (SEQ ID NO: 45), ARG1 (SEQ ID NO: 46), IDO1 (SEQ ID NO: 47), IL4 (SEQ ID NO: 48), TGFβ1 (SEQ ID NO: 49), TGFβ2 (SEQ ID NO: 50), TGFβ3 (SEQ ID NO: 51), ADAM17 (SEQ ID NO: 52), CD39 (SEQ ID NO: 53), CD73 (SEQ ID NO: 54), CD274, CYBB/gp91phox/NOX2 (SEQ ID NO: 55), BACE1 (SEQ ID NO: 56), NCKAP1L (SEQ ID NO: 57), TREM2 (SEQ ID NO: 30), EP2 (SEQ ID NO: 58), IL12A (SEQ ID NO: 21), IL12B (SEQ ID NO: 22), or TNFA.

40-49. (canceled)

50. A nucleotide sequence for a 3′ UTR that improves the stability of a mRNA sequence, wherein cDNA is used to create the 3′ UTR sequence, and the cDNA comprises the sequence of KJ1 (SEQ ID NO: 6), mtRNR1-KJ1 (SEQ ID NO: 7), mtRNR1-AES-KJ1 (SEQ ID NO: 8), KJ2 (SEQ ID NO: 9), mtRNR1-KJ2 (SEQ ID NO: 10), mtRNR1-AES-KJ2 (SEQ ID NO: 11), or KJ3 (SEQ ID NO: 12).

51. A method of treating a mammal having cancer, a tumor, a neurodegenerative condition, an autoimmune disorder, or an inflammatory disorder, the method comprising administering the myeloid cell or mesenchymal cell of claim 1 to the mammal.

The application's sequence listing, which the Patent Office published only in electronic form, follows.

SEQUENCE LISTING (70 sequences)

SEQ ID NO: 1 - DNA, 10 bp, synthetic construct
  source 1..10: mol_type = other DNA
gccrccatgg

SEQ ID NO: 2 - DNA, 1599 bp, Homo sapiens
  source 1..1599: mol_type = genomic DNA
atgtgtcaccagcagctggtgatcagctggttctctttagtgtttttagccagccctttagtcgccatttgggagctcaagaaggacgtgtacgtggtggagctggattggtaccccgacgctcccggcgagatggtggtgctgacatgcgacacacccgaggaagacggcatcacttggaccctcgaccaatcctccgaggtgctgggatccggcaaaacactgaccatccaagttaaggagttcggcgacgccggccagtacacttgtcacaaaggcggcgaggtgctgtcccacagcctcttattactccacaagaaagaggacggtatctggtccaccgatattttaaaggaccagaaggaacccaaaaataagacctttttaaggtgcgaggccaagaactacagcggaaggttcacttgttggtggctgaccaccatcagcaccgatctcacattcagcgtcaaatcctccagaggcagcagcgatccccaaggtgtgacatgcggagctgccaccctcagcgccgagagagtgaggggcgacaacaaagagtacgagtactccgtggagtgccaagaagatagcgcttgccccgccgctgaggagtctttacctattgaagtgatggtggacgctgtgcacaagctgaagtatgagaactataccagcagctttttcattagagacatcatcaagcccgaccctcccaagaatttacagctcaagcctttaaagaattccagacaagttgaggtgagctgggaataccccgacacttggtccaccccccactcctacttctctttaacattctgcgtgcaagttcaaggtaaaagcaagagggagaagaaggatcgtgtgttcaccgacaaaacatccgccacagtcatctgtcgtaagaatgcctccattagcgtgagggcccaagatcgttattatagcagcagctggtccgagtgggcctctgtcccttgtagcggcggaggcggaggcggttcaagaaacctgcccgtggcgacccccgatcccggcatgttcccctgcctgcaccactctcagaacctgctgagagccgtgagcaacatgctgcagaaggctagacagaccctggagttctacccctgcacaagcgaggagatcgaccacgaggacatcaccaaggacaagacaagcacagtagaggcctgcctgcccctggagctgaccaagaacgagagctgcctgaacagcagagaaacaagcttcatcaccaacggcagctgcctggcaagcagaaagacaagcttcatgatggccctgtgcctgagcagcatctacgaggacctgaagatgtaccaagtggagttcaagaccatgaacgccaagctgctgatggaccccaagagacagatcttcctggatcagaacatgctggccgtgatcgacgagctgatgcaagccctgaacttcaacagcgagaccgtgcctcagaagagcagcctggaggagcccgacttctacaagaccaagatcaagctgtgcatcctgctgcacgccttcagaatcagagccgtgaccatcgacagagtgatgagctacctgaacgcaagctaa

SEQ ID NO: 3 - DNA, 639 bp, Homo sapiens
  source 1..639: mol_type = other DNA
atgaacagctttagcacaagcgccttcggccccgtggccttctccctgggtctgcttttggtgctgcccgccgcttttcccgcccccgttcccccgggagaggacagcaaggacgtggccgcaccccacagacagcccctgacaagcagcgagagaatcgacaagcagatcagatacatcctggacggcatcagcgccctgagaaaggagacctgcaacaagagcaacatgtgcatgaacaacgacgacgccctggccgagaacaacctgaacctgcccaagatggccgagaaggacggctgctttcagagcggcttcaacgaggagacctgcctggtgaagatcatcaccggcctgctggagttcgaggtgtacctggagtacctgcagaacagattcgagagcagcgaggagcaagctagagccgtgcagatgagcaccaaggtgctgatccaattcttgcaaaagaaagccaagaacctggacgccatcaccacccccgaccccaccaccaacgcaagcctgctgaccaagctgcaagctcagaatcagtggctggaggacatgcccacccacctgatcctgagaagcctgaaggaatttcttcagcggtccctgagagccctgagacagatgtaa

SEQ ID NO: 4 - DNA, 786 bp, Homo sapiens
  source 1..786: mol_type = genomic DNA
atgatcgagacctacaatcagacaagccctagaagcgccgccaccggcctgcccatcagcatgaagatcttcatgtacctgctgaccgtgttcctgatcacacagatgatcggcagcgccctgttcgccgtgtacctgcacagaagactggacaagatcgaggacgagagaaacctgcacgaggacttcgtgttcatgaagaccattcagagatgcaacaccggcgagagaagcctgagcctgctgaactgcgaggagatcaagtctcagttcgagggcttcgtgaaggacatcatgctgaacaaggaggagaccaagaaggagaacagcttcgagatgcagaagggcgatcagaaccctcagatcgccgcccacgtgatcagcgaagcgagcagcaagaccacaagcgtgctgcagtgggccgagaagggctactacaccatgagcaacaacctggtgaccctggagaacggcaagcagctgaccgtgaagagacaaggcctgtactacatctacgcccaagtgaccttctgcagcaacagagaagcaagcagccaagcccccttcatcgcaagcctgtgcctgaagagccccggcagattcgagagaatcctgctgagagccgccaacacccacagcagcgccaagccctgcgggcagcagagcatccacctgggcggcgtgttcgagctgcagcccggcgcaagcgtgttcgtgaacgtgaccgaccctagccaagtgagccacggcaccggcttcacaagcttcggcctgctgaagctgtaa

SEQ ID NO: 5 - DNA, 474 bp, Homo sapiens
  source 1..474: mol_type = genomic DNA
atggagcccctgagactgctgatcctgctgttcgtgaccgagctgagcggcgcccacaacaccaccgtgttccaaggcgtggccggtcaaagcctacaagtgagctgcccctacgacagcatgaagcactggggcagaagaaaggcctggtgcagacagctgggcgagaagggcccctgtcagagagtggtgagcacccacaacctgtggctgctgagcttcctgagaagatggaacggcagcaccgccatcaccgacgacaccctgggcggcaccctgaccatcaccctcagaaacctgcagccccacgacgccggcctgtatcagtgtcagagcctgcacggcagcgaggccgacaccctgagaaaggtgctggtggaagtgctcgccgatcctctggaccacagagatgcgggcgacctgtggttccccggcgagagcgagagcttcgaggacgcccacgtggagcactaa

SEQ ID NO: 6 - DNA, 154 bp, synthetic construct
  source 1..154: mol_type = other DNA
actagtacgtgccacgggtgcgtggcacagggatacggaggtgatccataggcgtggtgtagcccgcatggtgtagccacgtgccacgcgcgccgtggcacagggatacggacgcgcatccataggcgtcgcgctagcccgcatcgcgctagcc

SEQ ID NO: 7 - DNA, 290 bp, synthetic construct
  source 1..290: mol_type = other DNA
caagcacgcagcaatgcagctcaaaacgcttagcctagccacacccccacgggaaacagcagtgattaacctttagcaataaacgaaagtttaactaagctatactaaccccagggttggtcaatttcgtgccagccacaccacgtgccacgggtgcgtggcacagggatacggaggtgatccataggcgtggtgtagcccgcatggtgtagccacgtgccacgcgcgccgtggcacagggatacggacgcgcatccataggcgtcgcgctagcccgcatcgcgctagcc

SEQ ID NO: 8 - DNA, 411 bp, synthetic construct
  source 1..411: mol_type = other DNA
caagcacgcagcaatgcagctcaaaacgcttagcctagccacacccccacgggaaacagcagtgattaacctttagcaataaacgaaagtttaactaagctatactaaccccagggttggtcaatttcgtgccagccacaccctggtactgcatgcacgcaatgctagctgcccctttcccgtcctgggtaccccgagtctcccccgacctcgggtcccaggtatgctcccacctccacctgccccactcaccacctctgctagttccagacacctccacgtgccacgggtgcgtggcacagggatacggaggtgatccataggcgtggtgtagcccgcatggtgtagccacgtgccacgcgcgccgtggcacagggatacggacgcgcatccataggcgtcgcgctagcc

SEQ ID NO: 9 - DNA, 177 bp, synthetic construct
  source 1..177: mol_type = other DNA
acgtgccacgggtgcgtggcacagggatacggaggtgatccataggcgttttttagccacgtgccacgcgcgccgtggcacagggcgtcgcgctagccggatacggattttatccataggcgtggtgtagccggatacggacgcgcatccataacgtgccacgttttcgtggcacag

SEQ ID NO: 10 - DNA, 319 bp, synthetic construct
  source 1..319: mol_type = other DNA
caagcacgcagcaatgcagctcaaaacgcttagcctagccacacccccacgggaaacagcagtgattaacctttagcaataaacgaaagtttaactaagctatactaaccccagggttggtcaatttcgtgccagccacaccacgtgccacgggtgcgtggcacagggatacggaggtgatccataggcgttttttagccacgtgccacgcgcgccgtggcacagggcgtcgcgctagccggatacggattttatccataggcgtggtgtagccggatacggacgcgcatccataacgtgccacgttttcgtggcacag

SEQ ID NO: 11 - DNA, 455 bp, synthetic construct
  source 1..455: mol_type = other DNA
caagcacgcagcaatgcagctcaaaacgcttagcctagccacacccccacgggaaacagcagtgattaacctttagcaataaacgaaagtttaactaagctatactaaccccagggttggtcaatttcgtgccagccacaccctggtactgcatgcacgcaatgctagctgcccctttcccgtcctgggtaccccgagtctcccccgacctcgggtcccaggtatgctcccacctccacctgccccactcaccacctctgctagttccagacacctccacgtgccacgggtgcgtggcacagggatacggaggtgatccataggcgttttttagccacgtgccacgcgcgccgtggcacagggcgtcgcgctagccggatacggattttatccataggcgtggtgtagccggatacggacgcgcatccataacgtgccacgttttcgtggcacag

SEQ ID NO: 12 - DNA, 334 bp, synthetic construct
  source 1..334: mol_type = other DNA
aaaacgcttagcctagccacacccccacgggaacgtgccacgggtgcgtggcacagggatacggaggtgatccataggcgtggtgtagcctgctcccacctccacctgccccactcaccacctctacgtgccacgcgcgccgtggcacagggcgtcgcgctagccggatacggattttatccatacatggggcagtaaagacaaggttcagagcaaaaagcataattggatgcctacacacacacatatgtcttctgagtctgggcagcagtccctcccaagccctccactgacagccatgtgtcttctccttgagccaaagaagccaaagatc

SEQ ID NO: 13 - DNA, 266 bp, synthetic construct
  source 1..266: mol_type = other DNA
ctagcgagggcggacaagcgacttcctctttccagcagaaaaggagaagtaggagccaagatttccaaactctgtggttgccttgaagcgacttcctctttccagaagcgacttcctctttccagcagaaaaggagaagtaggagctcctacttctccttttctgccaagatttccaaactctgtggttgccttgctcctacttctccttttctgcagaaaaggagaagtaggagctggaaagaggaagtcgcttgagggcggacg

SEQ ID NO: 14 - DNA, 479 bp, synthetic construct
  source 1..479: mol_type = other DNA
ctagccgccctccagaaaaggagaagtaggagtgagcctccgccctcttcctcaaggcaaccacagagtttggaaatcttggaagcgacttcctctttccagcagaaaaggagaagtaggaggggttatgagtcagttgccactcctacttctcttttctaaggcaaccacagagtttggaaatcttggagggcggactggcaactgactcataaccccaaggcaaccacagagtttggaaatcttggaagcgacttcctctttccaggaagagggcggaggctcactcctacttctcctttttctagagccacagagtttgaaaatcttggctctctacttctccttttctcaagatctctgtggttgccttgctcctacttctccttttctggagggcggaccctagagggcggaccaaggcaaccacagagtttggaaatcttggctcctacttctccttttctggtncgccctcg

SEQ ID NO: 15 - DNA, 600 bp, synthetic construct
  source 1..600: mol_type = other DNA
gtgcagccacattacaaatgacaataaaggaatcacctttgtctttctacaaaggttggagccacagatccggtatggttgtggggtttgttgttggtagttgggttatagtttggattttttagcagcagagggagggacatagacagttgtctacagggcccagaagataaccccctattagtaaactggccccttctccctctgcaggtctcatgggcatggaagaagaccccaccaccatcccacactctgagctcctcgttgcccctagccacatagcccccaataattcccaccctgaggtgagacaaatgctgaataccagaggaatcaagccactcagaatatgcttatagggacaaagtctcccacatcccgtcccctggatccccctacagccccctgctgtccatcgcggcctcaacccctgcagatggcagcctgcaccacaaaaaggcaacttagaggtgtttttttcttttttccttccagttcttggttgtaattggattcaggctaaaacaaccacgtccccaaccaggaaaggagggcactggggcggggacggaggagaggctgtgggagaagggagggacc

SEQ ID NO: 16 - DNA, 307 bp, synthetic construct
  source 1..307: mol_type = other DNA
ctagcgagggcggacaagcgacttcctctttccagcagaaaaggagaagtaggagccaagatttccaaactctgtggttgccttgaagcgacttcctctttccagaagcgacttcctctttccagcagaaaaggagaagtaggagctcctacttctccttttctgccaagatttccaaactctgtggttgccttgctcctacttctccttttctgcagaaaaggagaagtaggagctggaaagaggaagtcgcttgagggcggacggaggtgtttttttcttttttccttccagttcttggttgtaa

SEQ ID NO: 17 - DNA, 520 bp, synthetic construct
  source 1..520: mol_type = other DNA
ctagccgccctccagaaaaggagaagtaggagtgagcctccgccctcttcctcaaggcaaccacagagtttggaaatcttggaagcgacttcctctttccagcagaaaaggagaagtaggaggggttatgagtcagttgccactcctacttctcttttctaaggcaaccacagagtttggaaatcttggagggcggactggcaactgactcataaccccaaggcaaccacagagtttggaaatcttggaagcgacttcctctttccaggaagagggcggaggctcactcctacttctcctttttctagagccacagagtttgaaaatcttggctctctacttctccttttctcaagatctctgtggttgccttgctcctacttctccttttctggagggcggaccctagagggcggaccaaggcaaccacagagtttggaaatcttggctcctacttctccttttctggtacgccctcggaggtgtttttttcttttttccttccagttcttggttgtaa

SEQ ID NO: 18 - DNA, 534 bp, Homo sapiens
  source 1..534: mol_type = other DNA
atggagatctgcagaggcctgagaagccacctgatcaccctgctgctgttcctgttccacagcgagaccatctgcagacctagcggcagaaagagcagcaagatgcaagccttcagaatctgggacgtgaatcagaagaccttctacctgagaaacaatcagctggtggccggctacctgcaaggccccaacgtgaacctggaggagaagatcgacgtggtgcccatcgagccccacgccctgttcctgggcatccacggcggcaagatgtgcctgagctgcgtgaagagcggcgacgagacaagactgcagctggaggccgtgaacatcaccgacctgagcgagaacagaaagcaagacaagagattcgccttcatccggagcgacagcggacccacgacaagctttgagagcgccgcgtgtccgggctggttcctgtgcaccgccatggaggccgatcagcccgtgagcctgaccaacatgcccgacgagggcgtgatggtgaccaagttctacttccaagaggacgagtaa

SEQ ID NO: 19 - DNA, 1029 bp, Homo sapiens
  source 1..1029: mol_type = other DNA
ctatcacctaagtgtgggctaatgtaacaaagagggatttcacctacatccattcagtcagtctttgggggtttaaagaaattccaaagagtcatcagaagaggaaaaatgaaggtaatgttttttcagacaggtaaagtctttgaaaatatgtgtaatatgtaaaacattttgacacccccataatatttttccagaattaacagtataaattgcatctcttgttcaagagttccctatcactctctttaatcactactcacagtaacctcaactcctgccacaatgtacaggatgcaactcctgtcttgcattgcactaagtcttgcacttgtcacaaacagtgcacctacttcaagttctacaaagaaaacacagctacaactggagcatttactgctggatttacagatgattttgaatggaattaataattacaagaatcccaaactcaccaggatgctcacatttaagttttacatgcccaagaaggccacagaactgaaacatcttcagtgtctagaagaagaactcaaacctctggaggaagtgctaaatttagctcaaagcaaaaactttcacttaagacccagggacttaatcagcaatatcaacgtaatagttctggaactaaagggatctgaaacaacattcatgtgtgaatatgctgatgagacagcaaccattgtagaatttctgaacagatggattaccttttgtcaaagcatcatctcaacactgacttgataattaagtgcttcccacttaaaacatatcaggccttctatttatttaaatatttaaattttatatttattgttgaatgtatggtttgctacctattgtaactattattcttaatcttaaaactataaatatggatcttttatgattctttttgtaagccctaggggctctaaaatggtttcacttatttatcccaaaatatttattattatgttgaatgttaaatatagtatctatgtagattggttagtaaaactatttaataaatttgataaatataaa

SEQ ID NO: 20 - DNA, 537 bp, Homo sapiens
  source 1..537: mol_type = other DNA
atgcacagctcagcactgctctgttgcctggtcctcctgactggggtgagggccagcccaggccagggcacccagtctgagaacagctgcacccacttcccaggcaacctgcctaacatgcttcgagatctccgagatgccttcagcagagtgaagactttctttcaaatgaaggatcagctggacaacttgttgttaaaggagtccttgctggaggactttaagggttacctgggttgccaagccttgtctgagatgatccagttttacctggaggaggtgatgccccaagctgagaaccaagacccagacatcaaggcgcatgtgaactccctgggggagaacctgaagaccctcaggctgaggctacggcgctgtcatcgatttcttccctgtgaaaacaagagcaaggccgtggagcaggtgaagaatgcctttaataagctccaagagaaaggcatctacaaagccatgagtgagtttgacatcttcatcaactacatagaagcctacatgacaatgaagatacgaaactga

SEQ ID NO: 21 - DNA, 1021 bp, Homo sapiens
  source 1..1021: mol_type = other DNA
cgggagttaatccgaaagcgccgcaagccccgcgggccggccgcaccgcacgtgtcaccgagaagctgatgtagagagagacacagaaggagacagaaagcaagagaccagagtcccgggaaagtcctgccgcgcctcgggacaattataaaaatgtggccccctgggtcagcctcccagccaccgccctcacctgccgcggccacaggtctgcatccagcggctcgccctgtgtccctgcagtgccggctcagcatgtgtccagcgcgcagcctcctccttgtggctaccctggtcctcctggaccacctcagtttggccagaaacctccccgtggccactccagacccaggaatgttcccatgccttcaccactcccaaaacctgctgagggccgtcagcaacatgctccagaaggccagacaaactctagaattttacccttgcacttctgaagagattgatcatgaagatatcacaaaagataaaaccagcacagtggaggcctgtttaccattggaattaaccaagaatgagagttgcctaaattccagagagacctctttcataactaatgggagttgcctggcctccagaaagacctcttttatgatggccctgtgccttagtagtatttatgaagacttgaagatgtaccaggtggagttcaagaccatgaatgcaaagcttctgatggatcctaagaggcagatctttctagatcaaaacatgctggcagttattgatgagctgatgcaggccctgaatttcaacagtgagactgtgccacaaaaatcctcccttgaagaaccggatttttataaaactaaaatcaagctctgcatacttcttcatgctttcagaattcgggcagtgactattgatagagtgatgagctatctgaatgcttcctaaaaagcgaggtccctccaaaccgttgtcatttttataaaactttgaaatgaggaaactttgataggatgtggattaagaactagggagggggaaagaaggatgggac

SEQ ID NO: 22 - DNA, 1046 bp, Homo sapiens
  source 1..1046: mol_type = other DNA
ccattggactctccgtcctgcccagagcaagatgtgtcaccagcagttggtcatctcttggttttccctggtttttctggcatctcccctcgtggccatatgggaactgaagaaagatgtttatgtcgtagaattggattggtatccggatgcccctggagaaatggtggtcctcacctgtgacacccctgaagaagatggtatcacctggaccttggaccagagcagtgaggtcttaggctctggcaaaaccctgaccatccaagtcaaagagtttggagatgctggccagtacacctgtcacaaaggaggcgaggttctaagccattcgctcctgctgcttcacaaaaaggaagatggaatttggtccactgatattttaaaggaccagaaagaacccaaaaataagacctttctaagatgcgaggccaagaattattctggacgtttcacctgctggtggctgacgacaatcagtactgatttgacattcagtgtcaaaagcagcagaggctcttctgacccccaaggggtgacgtgcggagctgctacactctctgcagagagagtcagaggggacaacaaggagtatgagtactcagtggagtgccaggaggacagtgcctgcccagctgctgaggagagtctgcccattgaggtcatggtggatgccgttcacaagctcaagtatgaaaactacaccagcagcttcttcatcagggacatcatcaaacctgacccacccaagaacttgcagctgaagccattaaagaattctcggcaggtggaggtcagctgggagtaccctgacacctggagtactccacattcctacttctccctgacattctgcgttcaggtccagggcaagagcaagagagaaaagaaagatagagtcttcacggacaagacctcagccacggtcatctgccgcaaaaatgccagcattagcgtgcgggcccaggaccgctactatagctcatcttggagcgaatgggcatctgtgccctgcagttaggttctgatccaggatgaaaatttggagg

SEQ ID NO: 23 - DNA, 2582 bp, Homo sapiens
  source 1..2582: mol_type = other DNA
aaagaatttctcaggctcaaaatccaatacaggagtgacttggaactccattctatcactatgaagaaaagtggtgttcttttcctcttgggcatcatcttgctggttctgattggagtgcaaggaaccccagtagtgagaaagggtcgctgttcctgcatcagcaccaaccaagggactatccacctacaatccttgaaagaccttaaacaatttgccccaagcccttcctgcgagaaaattgaaatcattgctacactgaagaatggagttcaaacatgtctaaacccagattcagcagatgtgaaggaactgattaaaaagtgggagaaacaggtcagccaaaagaaaaagcaaaagaatgggaaaaaacatcaaaaaaagaaagttctgaaagttcgaaaatctcaacgttctcgtcaaaagaagactacataagagaccacttcaccaataagtattctgtgttaaaaatgttctattttaattataccgctatcattccaaaggaggatggcatataatacaaaggcttattaatttgactagaaaatttaaaacattactctgaaattgtaactaaagttagaaagttgattttaagaatccaaacgttaagaattgttaaaggctatgattgtctttgttcttctaccacccaccagttgaatttcatcatgcttaaggccatgattttagcaatacccatgtctacacagatgttcacccaaccacatcccactcacaacagctgcctggaagagcagccctaggcttccacgtactgcagcctccagagagtatctgaggcacatgtcagcaagtcctaagcctgttagcatgctggtgagccaagcagtttgaaattgagctggacctcaccaagctgctgtggccatcaacctctgtatttgaatcagcctacaggcctcacacacaatgtgtctgagagattcatgctgattgttattgggtatcaccactggagatcaccagtgtgtggctttcagagcctcctttctggctttggaagccatgtgattccatcttgcccgctcaggctgaccactttatttctttttgttcccctttgcttcattcaagtcagctcttctccatcctaccacaatgcagtgcctttcttctctccagtgcacctgtcatatgctctgatttatctgagtcaactcctttctcatcttgtccccaacaccccacagaagtgctttcttctcccaattcatcctcactcagtccagcttagttcaagtcctgcctcttaaataaacctttttggacacacaaattatcttaaaactcctgtttcacttggttcagtaccacatgggtgaacactcaatggttaactaattcttgggtgtttatcctatctctccaaccagattgtcagctccttgagggcaagagccacagtatatttccctgtttcttccacagtgcctaataatactgtggaactaggttttaataattttttaattgatgttgttatgggcaggatggcaaccagaccattgtctcagagcaggtgctggctctttcctggctactccatgttggctagcctctggtaacctcttacttattatcttcaggacactcactacagggaccagggatgatgcaacatccttgtctttttatgacaggatgtttgctcagcttctccaacaataagaagcacgtggtaaaacacttgcggatattctggactgtttttaaaaaatatacagtttaccgaaaatcatataatcttacaatgaaaaggactttatagatcagccagtgaccaaccttttcccaaccatacaaaaattccttttcccgaaggaaaagggctttctcaataagcctcagctttctaagatctaacaagatagccaccgagatccttatcgaaactcattttaggcaaatatgagttttattgtccgtttacttgtttcagagtttgtattgtgattatcaattaccacaccatctcccatgaagaaagggaacggtgaagtactaagcgctagaggaagcagccaagtcggttagtggaagcatgattggtgcccagttagcctctgcaggatgtggaaacctccttccaggggaggttcagtgaattgtgtaggagaggttgtctgtggccagaatttaaacctatactcactttcccaaattgaatcaccgctcacactgctgatgatttagagtgctgtccggtggagatcccacccgaacgtcttatctaatcatgaaactccctagttccttcatgtaacttccctgaaaaatctaagtgtttcataaatttgagagtctgtgacccacttaccttgcatctcacaggtagacagtatataactaacaaccaaagactacatattgtcactgacacacacgttataatcatttattatatatatacatacatgcatacactctcaaagcaaataatttttcacttcaaaacagtattgacttgtataccttgtaatttgaaatattttctttgttaaaatagaatggtatcaataaatagaccattaatcagaaaaaaaaaaaaaaaa

SEQ ID NO: 24 - DNA, 1207 bp, Homo sapiens
  source 1..1207: mol_type = other DNA
gggggagacattcctcaattgcttagacatattctgagcctacagcagaggaacctccagtctcagcaccatgaatcaaactgccattctgatttgctgccttatctttctgactctaagtggcattcaaggagtacctctctctagaactgtacgctgtacctgcatcagcattagtaatcaacctgttaatccaaggtctttagaaaaacttgaaattattcctgcaagccaattttgtccacgtgttgagatcattgctacaatgaaaaagaagggtgagaagagatgtctgaatccagaatcgaaggccatcaagaatttactgaaagcagttagcaaggaaaggtctaaaagatctccttaaaaccagaggggagcaaaatcgatgcagtgcttccaaggatggaccacacagaggctgcctctcccatcacttccctacatggagtatatgtcaagccataattgttcttagtttgcagttacactaaaaggtgaccaatgatggtcaccaaatcagctgctactactcctgtaggaaggttaatgttcatcatcctaagctattcagtaataactctaccctggcactataatgtaagctctactgaggtgctatgttcttagtggatgttctgaccctgcttcaaatatttccctcacctttcccatcttccaagggtactaaggaatctttctgctttggggtttatcagaattctcagaatctcaaataactaaaaggtatgcaatcaaatctgctttttaaagaatgctctttacttcatggacttccactgccatcctcccaaggggcccaaattctttcagtggctacctacatacaattccaaacacatacaggaaggtagaaatatctgaaaatgtatgtgtaagtattcttatttaatgaaagactgtacaaagtagaagtcttagatgtatatatttcctatattgttttcagtgtacatggaataacatgtaattaagtactatgtatcaatgagtaacaggaaaattttaaaaatacagatagatatatgctctgcatgttacataagataaatgtgctgaatggttttcaaaataaaaatgaggtactctcctggaaatattaagaaagactatctaaatgttgaaagatcaaaaggttaataaagtaattataactcaaaaaaaaaaaaaaaaaaaaaaaaaaaaa

SEQ ID NO: 25 - DNA, 8772 bp, Homo sapiens
  source 1..8772: mol_type = other DNA
atgctcagtggcttctcgacaagttggcagcaacaacacggccctggtcgtcgtcgccgctgcggtaacggagcggtttgggtggcggagcctgcgttcgcgccttcccgctctcctcgggaggcccttcctgctctcccctaggctccgcggccgcccagggggtgggagcgggtgaggggagccaggcgcccagcgagagaggccccccgccgcagggcggcccgggagctcgaggcggtccggcccgcgcgggcagcggcgcggcgctgaggaggggcggcctggccgggacgcctcggggcgggggccgaggagctctccgggccgccggggaaagctacgggcccggtgcgtccgcggaccagcagcgcgggagagcggactcccctcgccaccgcccgagcccaggttatcctgaatacatgtctaacaattttccttgcaacgttagctgttgtttttcactgtttccaaaggatcaaaattgcttcagaaattggagacatatttgatttaaaaggaaaaacttgaacaaatggacaatatgtctattacgaatacaccaacaagtaatgatgcctgtctgagcattgtgcatagtttgatgtgccatagacaaggtggagagagtgaaacatttgcaaaaagagcaattgaaagtttggtaaagaagctgaaggagaaaaaagatgaattggattctttaataacagctataactacaaatggagctcatcctagtaaatgtgttaccatacagagaacattggatgggaggcttcaggtggctggtcggaaaggatttcctcatgtgatctatgcccgtctctggaggtggcctgatcttcacaaaaatgaactaaaacatgttaaatattgtcagtatgcgtttgacttaaaatgtgatagtgtctgtgtgaatccatatcactacgaacgagttgtatcacctggaattgatctctcaggattaacactgcagagtaatgctccatcaagtatgatggtgaaggatgaatatgtgcatgactttgagggacagccatcgttgtccactgaaggacattcaattcaaaccatccagcatccaccaagtaatcgtgcatcgacagagacatacagcaccccagctctgttagccccatctgagtctaatgctaccagcactgccaactttcccaacattcctgtggcttccacaagtcagcctgccagtatactggggggcagccatagtgaaggactgttgcagatagcatcagggcctcagccaggacagcagcagaatggatttactggtcagccagctacttaccatcataacagcactaccacctggactggaagtaggactgcaccatacacacctaatttgcctcaccaccaaaacggccatcttcagcaccacccgcctatgccgccccatcccggacattactggcctgttcacaatgagcttgcattccagcctcccatttccaatcatcctgctcctgagtattggtgttccattgcttactttgaaatggatgttcaggtaggagagacatttaaggttccttcaagctgccctattgttactgttgatggatacgtggacccttctggaggagatcgcttttgtttgggtcaactctccaatgtccacaggacagaagccattgagagagcaaggttgcacataggcaaaggtgtgcagttggaatgtaaaggtgaaggtgatgtttgggtcaggtgccttagtgaccacgcggtctttgtacagagttactacttagacagagaagctgggcgtgcacctggagatgctgttcataagatctacccaagtgcatatataaaggtctttgatttgcgtcagtgtcatcgacagatgcagcagcaggcggctactgcacaagctgcagcagctgcccaggcagcagccgtggcaggaaacatccctggcccaggatcagtaggtggaatagctccagctatcagtctgtcagctgctgctggaattggtgttgatgaccttcgtcgcttatgcatactcaggatgagttttgtgaaaggctggggaccggattacccaagacagagcatcaaagaaacaccttgctggattgaaattcacttacaccgggccctccagctcctagacgaagtacttcataccatgccgattgcagacccacaacctttagactgaggtcttttaccgttggggcccttaaccttatcaggatggtggactacaaaatacaatcctgtttataatctgaagatatatttcacttttgttctgctttatcttttcataaagggttgaaaatgtgtttgctgccttgctcctagcagacagaaactggattaaaacaattttttttttcctcttcagaacttgtcaggcatggctcagagcttgaagattaggagaaacacattcttattaattcttcacctgttatgtatgaaggaatcattccagtgctagaaaatttagccctttaaaacgtcttagagccttttatctgcagaacatcgatatgtatatcattctacagaataatccagtattgctgattttaaaggcagagaagttctcaaagttaattcacctatgttattttgtgtacaagttgttattgttgaacatacttcaaaaataatgtgccatgtgggtgagttaattttaccaagagtaactttactctgtgtttaaaaagtaagttaataatgtattgtaatctttcatccaaaatattttttgcaagttatattagtgaagatggtttcaattcagattgtcttgcaacttcagttttatttttgccaaggcaaaaaactcttaatctgtgtgtatattgagaatcccttaaaattaccagacaaaaaaatttaaaattacgtttgttattcctagtggatgactgttgatgaagtatacttttcccctgttaaacagtagttgtattcttctgtatttctaggcacaaggttggttgctaagaagcctataagaggaatttcttttccttcattcatagggaaaggttttgtattttttaaaacactaaaagcagcgtcactctacctaatgtctcactgttctgcaaaggtggcaatgcttaaactaaataatgaataaactgaatattttggaaactgctaaattctatgttaaatactgtgcagaataatggaaacattacagttcataataggtagtttggatatttttgtacttgatttgatgtgactttttttggtataatgtttaaatcatgtatgttatgatattgtttaaaattcagtttttgtatcttggggcaagactgcaaacttttttatatcttttggttattctaagccctttgccatcaatgatcatatcaattggcagtgactttgtatagagaatttaagtagaaaagttgcagatgtattgactgtaccacagacacaatatgtatgctttttacctagctggtagcataaataaaactgaatctcaacatacaaagttgaattctaggtttgatttttaagattttttttttcttttgcacttttgagtccaatctcagtgatgaggtaccttctactaaatgacaggcaacagccagttctattgggcagctttgtttttttccctcacactctaccgggacttccccatggacattgtgtatcatgtgtagagttggttttttttttttttaatttttattttactatagcagaaatagacctgattatctacaagatgataaatagattgtctacaggataaatagtatgaaataaaatcaaggattatctttcagatgtgtttacttttgcctggagaacttttagctatagaaacacttgtgtgatgatagtcctccttatatcacctggaatgaacacagcttctactgccttgctcagaaggtcttttaaatagaccatcctagaaaccactgagtttgcttatttctgtgatttaaacatagatcttgatccaagctacatgacttttgtctttaaataacttatctaccacctcatttgtactcttgattacttacaaattctttcagtaaacacctaattttcttctgtaaaagtttggtgatttaagttttattggcagttttataaaaagacatcttctctagaaattgctaactttaggtccattttactgtgaatgaggaataggagtgagttttagaataacagatttttaaaaatccagatgatttgattaaaaccttaatcatacattgacataattcattgcttcttttttttgagatatggagtcttgctgtgttgcccaggcaggagtgcagtggtatgatctcagctcactgcaacctctgcctcccgggttcaactgattctcctgcctcagcctccctggtagctaggattacaggtgcccgccaccatgcctggctaacttttgtagttttagtagagacggggttttgcctgttggccaggctggtcttgaactcctgacctcaagtgatccatccaccttggcctcccaaagtgctgggattacgggcgtgagccactgtccctggcctcattgttcccttttctactttaaggaaagttttcatgtttaatcatctggggaaagtatgtgaaaaatatttgttaagaagtatctctttggagccaagccacctgtcttggtttctttctactaagagccataaagtatagaaatacttctagttgttaagtgcttatatttgtacctagatttagtcacacgcttttgagaaaacatctagtatgttatgatcagctattcctgagagcttggttgttaatctatatttctatttcttagtggtagtcatctttgatgaataagactaaagattctcacaggtttaaaattttatgtctactttaagggtaaaattatgaggttatggttctgggtgggttttctctagctaattcatatctcaaagagtctcaaaatgttgaatttcagtgcaagctgaatgagagatgagccatgtacacccaccgtaagacctcattccatgtttgtccagtgcctttcagtgcattatcaaagggaatccttcatggtgttgcctttattttccggggagtagatcgtgggatatagtctatctcatttttaatagtttaccgcccctggtatacaaagataatgacaataaatcactgccatataaccttgctttttccagaaacatggctgttttgtattgctgtaaccactaaataggttgcctataccattcctcctgtgaacagtgcagatttacaggttgcatggtctggcttaaggagagccatacttgagacatgtgagtaaactgaactcatattagctgtgctgcatttcagacttaaaatccatttttgtggggcagggtgtggtgtgtaaaggggggtgtttgtaatacaagttgaaggcaaaataaaatgtcctgtctcccagatgatatacatcttattatttttaaagtttattgctaattgtaggaaggtgagttgcaggtatctttgactatggtcatctggggaaggaaaattttacattttactattaatgctccttaagtgtctatggaggttaaagaataaaatggtaaatgtttctgtgcctggtttgatggtaactggttaatagttactcaccattttatgcagagtcacattagttcacaccctttctgagagccttttgggagaagcagttttattctctgagtggaacagagttctttttgttgataatttctagtttgctcccttcgttattgccaactttactggcattttatttaatgatagcagattgggaaaatggcaaatttaggttacggaggtaaatgagtatatgaaagcaattacctctaaagccagttaacaattattttgtaggtggggtacactcagcttaaagtaatgcatttttttttcccgtaaaggcagaatccatcttgttgcagatagctatctaaataatctcatatcctcttttgcaaagactacagagaataggctatgacaatcttgttcaagcctttccatttttttccctgataactaagtaatttctttgaacataccaagaagtatgtaaaaagtccatggccttattcatccacaaagtggcatcctaggcccagccttatccctagcagttgtcccagtgctgctaggttgcttatcttgtttatctggaatcactgtggagtgaaattttccacatcatccagaattgccttatttaagaagtaaaacgttttaatttttagcctttttttggtggagttatttaatatgtatatcagaggatatactagatggtaacatttctttctgtgcttggctatctttgtggacttcaggggcttctaaaacagacaggactgtgttgcctttactaaatggtctgagacagctatggttttgaatttttagttttttttttttaacccacttcccctcctggtctcttccctctctgataattaccattcatatgtgagtgttagtgtgcctccttttagcattttcttcttctctttctgattcttcatttctgactgcctaggcaaggaaaccagataaccaaacttactagaacgttctttaaaacacaagtacaaactctgggacaggacccaagacactttcctgtgaagtgctgaaaaagacctcattgtattggcatttgatatcagtttgatgtagcttagagtgcttcctgattcttgctgagtttcaggtagttgagatagagagaagtgagtcatattcatattttcccccttagaataatattttgaaaggtttcattgcttccacttgaatgctgctcttacaaaaactggggttacaagggttactaaattagcatcagtagccagaggcaataccgttgtctggaggacaccagcaaacaacacacaacaaagcaaaacaaaccttgggaaactaaggccatttgttttgttttggtgtcccctttgaagccctgccttctggccttactcctgtacagatatttttgacctataggtgcctttatgagaattgagggtctgacatcctgccccaaggagtagctaaagtaattgctagtgttttcagggattttaacatcagactggaatgaatgaatgaaactttttgtcctttttttttctgtttttttttttctaatgtagtaaggactaaggaaaacctttggtgaagacaatcatttctctctgttgatgtggatacttttcacaccgtttatttaaatgctttctcaataggtccagagccagtgttcttgttcaacctgaaagtaatggctctgggttgggccagacagttgcactctctagtttgccctctgccacaaatttgatgtgtgacctttgggcaagtcatttatcttctctgggccttagttgcctcatctgtaaaatgagggagttggagtagattaattattccagctctgaaattctaagtgaccttggctaccttgcagcagttttggatttcttccttatctttgttctgctgtttgagggggctttttacttatttccatgttattcaaaggagactaggcttgatattttattactgttcttttatggacaaaaggttacatagtatgcccttaagacttaattttaaccaaaggcctagcaccaccttaggggctgcaataaacacttaacgcgcgtgcgcacgcgcgcgcgcacacacacacacacacacacacacacacacaggtcagagtttaaggctttcgagtcatgacattctagcttttgaattgcgtgcacacacacacgcacgcacacactctggtcagagtttattaaggctttcgagtcatgacattatagcttttgagttggtgtgtgtgacaccaccctcctaagtggtgtgtgcttgtaattttttttttcagtgaaaatggattgaaaacctgttgttaatgcttagtgatattatgctcaaaacaaggaaattcccttgaaccgtgtcaattaaactggtttatatgactcaagaaaacaataccagtagatgattattaactttattcttggctctttttaggtccattttgattaagtgacttttggctggatcattcagagctctcttctagcctacccttggatgagtacaattaatgaaattcatattttcaaggacctgggagccttccttggggctgggttgagggtggggggttggggagtcctggtagaggccagctttgtggtagctggagaggaagggatgaaaccagctgctgttgcaaaggctgcttgtcattgatagaaggactcacgggcttggattgattaagactaaacatggagttggcaaactttcttcaagtattgagttctgttcaatgcattggacatgtgatttaagggaaaagtgtgaatgcttatagatgatgaaaacctggtgggctgcagagcccagtttagaagaagtgagttgggggttggggacagatttggtggtggtatttcccaactgtttcctcccctaaattcagaggaatgcagctatgccagaagccagagaagagccactcgtagcttctgctttggggacaactggtcagttgaaagtcccaggagttcctttgtggctttctgtatacttttgcctggttaaagtctgtggctaaaaaatagtcgaacctttcttgagaactctgtaacaaagtatgtttttgattaaaagagaaagccaactaaa

SEQ ID NO: 26 - DNA, 2780 bp, Homo sapiens
  source 1..2780: mol_type = other DNA
gccgccgccgcccttcgcgccctgggccatctccctcccacctccctccgcggagcagccagacagcgagggccccggccgggggcaggggggacgccccgtccggggcacccccccggctctgagccgcccgcggggccggcctcggcccggagcggaggaaggagtcgccgaggagcagcctgaggccccagagtctgagacgagccgccgccgcccccgccactgcggggaggagggggaggaggagcgggaggagggacgagctggtcgggagaagaggaaaaaaacttttgagacttttccgttgccgctgggagccggaggcgcggggacctcttggcgcgacgctgccccgcgaggaggcaggacttggggaccccagaccgcctccctttgccgccggggacgcttgctccctccctgccccctacacggcgtccctcaggcgcccccattccggaccagccctcgggagtcgccgacccggcctcccgcaaagacttttccccagacctcgggcgcaccccctgcacgccgccttcatccccggcctgtctcctgagcccccgcgcatcctagaccctttctcctccaggagacggatctctctccgacctgccacagatcccctattcaagaccacccaccttctggtaccagatcgcgcccatctaggttatttccgtgggatactgagacacccccggtccaagcctcccctccaccactgcgcccttctccctgaggacctcagctttccctcgaggccctcctaccttttgccgggagacccccagcccctgcaggggcggggcctccccaccacaccagccctgttcgcgctctcggcagtgccggggggcgccgcctcccccatgccgccctccgggctgcggctgctgccgctgctgctaccgctgctgtggctactggtgctgacgcctggccggccggccgcgggactatccacctgcaagactatcgacatggagctggtgaagcggaagcgcatcgaggccatccgcggccagatcctgtccaagctgcggctcgccagccccccgagccagggggaggtgccgcccggcccgctgcccgaggccgtgctcgccctgtacaacagcacccgcgaccgggtggccggggagagtgcagaaccggagcccgagcctgaggccgactactacgccaaggaggtcacccgcgtgctaatggtggaaacccacaacgaaatctatgacaagttcaagcagagtacacacagcatatatatgttcttcaacacatcagagctccgagaagcggtacctgaacccgtgttgctctcccgggcagagctgcgtctgctgaggctcaagttaaaagtggagcagcacgtggagctgtaccagaaatacagcaacaattcctggcgatacctcagcaaccggctgctggcacccagcgactcgccagagtggttatcttttgatgtcaccggagttgtgcggcagtggttgagccgtggaggggaaattgagggctttcgccttagcgcccactgctcctgtgacagcagggataacacactgcaagtggacatcaacgggttcactaccggccgccgaggtgacctggccaccattcatggcatgaaccggcctttcctgcttctcatggccaccccgctggagagggcccagcatctgcaaagctcccggcaccgccgagccctggacaccaactattgcttcagctccacggagaagaactgctgcgtgcggcagctgtacattgacttccgcaaggacctcggctggaagtggatccacgagcccaagggctaccatgccaacttctgcctcgggccctgcccctacatttggagcctggacacgcagtacagcaaggtcctggccctgtacaaccagcataacccgggcgcctcggcggcgccgtgctgcgtgccgcaggcgctggagccgctgcccatcgtgtactacgtgggccgcaagcccaaggtggagcagctgtccaacatgatcgtgcgctcctgcaagtgcagctgaggtcccgccccgccccgccccgccccggcaggcccggccccaccccgccccgcccccgctgccttgcccatgggggctgtatttaaggacacccgtgccccaagcccacctggggccccattaaagatggagagaggactgcggatctctgtgtcattgggcgcctgcctggggtctccatccctgacgttcccccactcccactccctctctctccctctctgcctcctcctgcctgtctgcactattcctttgcccggcatcaaggcacaggggaccagtggggaacactactgtagttagatctatttattgagcaccttgggcactgttgaagtgccttacattaatgaactcattcagtcaccatagcaacactctgagatgcagggactctgataacacccattttaaaggtgaggaaacaagcccagagaggttaagggaggagttcctgcccaccaggaacctgctttagtgggggatagtgaagaagacaataaaagatagtagttcaggccaggcggggtggctcacgcctgtaatcctagcacttttgggaggcagagatgggaggattacttgaatccaggcatttgagaccagcctgggtaacatagtgagaccctatctctacaaaacacttttaaaaaatgtacacctgtggtcccagctactctggaggctaaggtgggaggatcacttgatcctgggaggtcaaggctgcag

SEQ ID NO: 27 - DNA, 1426 bp, Homo sapiens
  source 1..1426: mol_type = other DNA
tgggcattgactagattgtttgcaaaagtttcgcatcaaaaacaacaacaacaaaaaaccaaacaactctccttgatctatactttgagaattgttgatttcttttttttattctgacttttaaaaacaacttttttttccacttttttaaaaaatgcactactgtgtgctgagcgcttttctgatcctgcatctggtcacggtcgcgctcagcctgtctacctgcagcacactcgatatggaccagttcatgcgcaagaggatcgaggcgatccgcgggcagatcctgagcaagctgaagctcaccagtcccccagaagactatcctgagcccgaggaagtccccccggaggtgatttccatctacaacagcaccagggacttgctccaggagaaggcgagccggagggcggccgcctgcgagcgcgagaggagcgacgaagagtactacgccaaggaggtttacaaaatagacatgccgcccttcttcccctccgaaaatgccatcccgcccactttctacagaccctacttcagaattgttcgatttgacgtctcagcaatggagaagaatgcttccaatttggtgaaagcagagttcagagtctttcgtttgcagaacccaaaagccagagtgcctgaacaacggattgagctatatcagattctcaagtccaaagatttaacatctccaacccagcgctacatcgacagcaaagttgtgaaaacaagagcagaaggcgaatggctctccttcgatgtaactgatgctgttcatgaatggcttcaccataaagacaggaacctgggatttaaaataagcttacactgtccctgctgcacttttgtaccatctaataattacatcatcccaaataaaagtgaagaactagaagcaagatttgcaggtattgatggcacctccacatataccagtggtgatcagaaaactataaagtccactaggaaaaaaaacagtgggaagaccccacatctcctgctaatgttattgccctcctacagacttgagtcacaacagaccaaccggcggaagaagcgtgctttggatgcggcctattgctttagaaatgtgcaggataattgctgcctacgtccactttacattgatttcaagagggatctagggtggaaatggatacacgaacccaaagggtacaatgccaacttctgtgctggagcatgcccgtatttatggagttcagacactcagcacagcagggtcctgagcttatataataccataaatccagaagcatctgcttctccttgctgcgtgtcccaagatttagaacctctaaccattctctactacattggcaaaacacccaagattgaacagctttctaatatgattgtaaagtcttgcaaatgcagctaaaattcttggaaaagtggcaagaccaaa

SEQ ID NO: 28 - DNA, 1449 bp, Homo sapiens
  source 1..1449: mol_type = other DNA
ccacgcgtccgctggggaggccgcctggttttcctccctccttctgcacgtctgctggggtctcttcctctccaggccttgccgtccccctggcctctcttcccagctcacacatgaagatgcacttgcaaagggctctggtggtcctggccctgctgaactttgccacggtcagcctctctctgtccacttgcaccaccttggacttcggccacatcaagaagaagagggtggaagccattaggggacagatcttgagcaagctcaggctcaccagcccccctgagccaacggtgatgacccacgtcccctatcaggtcctggccctttacaacagcacccgggagctgctggaggagatgcatggggagagggaggaaggctgcacccaggaaaacaccgagtcggaatactatgccaaagaaatccataaattcgacatgatccaggggctggcggagcacaacgaactggctgtctgccctaaaggaattacctccaaggttttccgcttcaatgtgtcctcagtggagaaaaatagaaccaacctattccgagcagaattccgggtcttgcgggtgcccaaccccagctctaagcggaatgagcagaggatcgagctcttccagatccttcggccagatgagcacattgccaaacagcgctatatcggtggcaagaatctgcccacacggggcactgccgagtggctgtcctttgatgtcactgacactgtgcgtgagtggctgttgagaagagagtccaacttaggtctagaaatcagcattcactgtccatgtcacacctttcagcccaatggagatatcctggaaaacattcacgaggtgatggaaatcaaattcaaaggcgtggacaatgaggatgaccatggccgtggagatctggggcgcctcaagaagcagaaggatcaccacaaccctcatctaatcctcatgatgattcccccacaccggctcgacaacccgggccaggggggtcagaggaagaagcgggctttggacaccaattactgcttccgcaacttggaggagaactgctgtgtgcgccccctctacattgacttccgacaggatctgggctggaagtgggtccatgaacctaagggctactatgccaacttctgctcaggcccttgcccatacctccgcagtgcagacacaacccacagcacggtgctgggactgtacaacactctgaaccctgaagcatctgcctcgccttgctgcgtgccccaggacctggagcccctgaccatcctgtactatgttgggaggacccccaaagtggagcagctctccaacatggtggtgaagtcttgtaaatgtagctgagaccccacgtgcgacagagagaggggagagagaaccaccactgcctgactgcccgctcctcgggaaacacacaagcaacaaacctcactgagaggcc

SEQ ID NO: 29 - DNA, 568 bp, Homo sapiens
  source 1..568: mol_type = other DNA
gctggtgcacaggaaggatgaggaagaccaggctctgggggctgctgtggatgctctttgtctcagaactccgagctgcaactaaattaactgaggaaaagtatgaactgaaagagggcaagaccctggatgtgaaatgtgactacacgctagagaagtttgccagcagccagaaagcttggcagataataagggacggagagatgcccaagaccctggcatgcacagagaggccttcaaagaattcccatccagtccaagtggggaggatcatactagaagactaccatgatcatggtttactgcgcgtccgaatggtcaaccttcaagtggaagattctggactgtatcagtgtgtgatctaccagcctcccaaggagcctcacatgctgttcgatcgcatccgcttggtggtgaccaaggggttccggtgttcaacattgtcattctcctggctggtggattcctgagtaagagcctggtcttctctgtcctgtttgctgtcacgctgaggtcatttgtaccctaggcccacgaacccncgagaatgtcctctgacttccagcca

SEQ ID NO: 30 - DNA, 1098 bp, Homo sapiens
  source 1..1098: mol_type = other DNA
ccttggctggggaagggtggcatggagcctctccggctgctcatcttactctttgtcacagagctgtccggagcccacaacaccacagtgttccagggcgtggcgggccagtccctgcaggtgtcttgcccctatgactccatgaagcactgggggaggcgcaaggcctggtgccgccagctgggagagaagggcccatgccagcgtgtggtcagcacgcacaacttgtggctgctgtccttcctgaggaggtggaatgggagcacagccatcacagacgataccctgggtggcactctcaccattacgctgcggaatctacaaccccatgatgcgggtctctaccagtgccagagcctccatggcagtgaggctgacaccctcaggaaggtcctggtggaggtgctggcagaccccctggatcaccgggatgctggagatctctggttccccggggagtctgagagcttcgaggatgcccatgtggagcacagcatctccaggccatctcaaggctcccatctgccttcttgtctctccaaggagcctcttggaaggagaaatccccttcccacccacttccatccttctcctcctggcctgcatctttctcatcaagattctagcagccagcgccctctgggctgcagcctggcatggacagaagccagggacacatccacccagtgaactggactgtggccatgacccagggtatcagctccaaactctgccagggctgagagacacgtgaaggaagatgatgggaggaaaagcccaggagaagtcccaccagggaccagcccagcctgcatacttgccacttggccaccaggactccttgttctgctctggcaagagactactctgcctgaacactgcttctcctggaccctggaagcagggactggttgagggagtggggaggtggtaagaacacctgacaacttctgaatattggacattttaaacacttacaaataaatccaagactgtcatatttagctggataaaaaaaaaaaaaaaaaaaaaaaaaaaaaaaaaaaaaaaaaaaaaaaaaaaaaaaaaaaaaaaaaaaaaaaaaaaaaaaaaaaaaaa

SEQ ID NO: 31 - DNA, 2014 bp, Homo sapiens
  source 1..2014: mol_type = other DNA
ttccgggaggagcggacgtcggcttctccccgcgggagcccccagcatggttgactatattgtggagtatgactatgatgctgtacatgatgatgaattaactattcgagttggagaaatcatcaggaatgtgaaaaagctacaggaggaagggtggctggaaggagaactaaatgggagaagaggaatgttccctgacaatttcgttaaggaaattaaaagagagacggaattcaaggatgacagtttgcccatcaaacgggaaaggcatgggaatgtagcaagtcttgtacaacgaataagcacctatggacttccagctggaggaattcagccacatccacaaaccaaaaacattaagaagaagaccaagaagcgtcagtgtaaagttctttttgagtacattccacaaaatgaggatgaactggagctgaaagtgggagatattattgatattaatgaagaggtagaagaaggctggtggagtggaaccctgaataacaagttgggactgtttccctcaaattttgtgaaagaattagaggtaacagatgatggtgaaactcatgaagcccaggacgattcagaaactgttttggctgggcctacttcacctataccttctctgggaaatgtgagtgaaactgcatctggatcagttacacagccaaagaaaattcgaggaattggatttggagacatttttaaagaaggctctgtgaaacttcggacaagaacatccagtagtgaaacagaagagaaaaaaccagaaaagcccttaatcctacagtcactgggacccaaaactcagagtgtggagataacaaaaacagataccgaaggtaaaattaaagctaaagaatattgtagaacattatttgcctatgaaggtactaatgaagatgaacttacttttaaagagggggagataatccatttgataagtaaggagactggagaagctggctggtggaggggcgaacttaatggtaaagaaggagtatttccagacaattttgctgtccagataaatgaacttgataaagactttccaaaaccaaagaaaccaccacctcctgctaaggctccagctccaaagcctgaactgatagctgcagagaagaaatatttttctttaaagcctgaagaaaaggatgaaaaatcaacactggaacagaaaccttctaaaccagcagctccacaagtcccacccaagaaacctactccacctaccaaagccagtaatttattgagatcttctggaacagtgtacccaaagcgacctgaaaaaccagttcctccaccacctcctatagccaagattaatggggaagtttctagcatttcatcaaaatttgaaactgagccagtatcaaaactaaagctagattctgaacagctgccccttagaccaaaatcagtagactttgattcacttacagtaaggacctccaaagaaacagatgttgtaaattttgatgacatagcttcctcagaaaacttgcttcatctcactgcaaatagaccaaagatgcctggaagaaggttgccgggccgtttcaatggtggacattctccaactcacagccccgaaaaaatcttgaagttaccaaaagaagaagacagtgccaacctgaagccatctgaattaaaaaaagatacatgctactctccaaagccatctgtgtacctttcaacaccttccagtgcttctaaagcaaatacaactgctttcctgactccattagaaatcaaagctaaagtggaaacagatgatgtgaaaaaaaattccctggatgaacttagagcccagattattgaattgttgtgcattgtagaagcactgaaaaaggatcacgggaaagaactggaaaaactgcgaaaagatttggaagaagagaagacaatgagaagtaatctagagatggaaatagagaagctgaaaaaagctgtcctgtcttcttgagtggtgtggacctggtgttcataatgttccagggattcagaagcaacg

SEQ ID NO: 32 - DNA, 1650 bp, Homo sapiens
  source 1..1650: mol_type = other DNA
cacaggaaaaggagcttagctgctggtgctgctggcaagatggaaaccaacttctccactcctctgaatgaatatgaagaagtgtcctatgagtctgctggctacactgttctgcggatcctcccattggtggtgcttggggtcacctttgtcctcggggtcctgggcaatgggcttgtgatctgggtggctggattccggatgacacgcacagtcaccaccatctgttacctgaacctggccctggctgacttttctttcacggccacattaccattcctcattgtctccatggccatgggagaaaaatggccttttggctggttcctgtgtaagttaattcacatcgtggtggacatcaacctctttggaagtgtcttcttgattggtttcattgcactggaccgctgcatttgtgtcctgcatccagtctgggcccagaaccaccgcactgtgagtctggccatgaaggtgatcgtcggaccttggattcttgctctagtccttaccttgccagttttcctctttttgactacagtaactattccaaatggggacacatactgtactttcaactttgcatcctggggtggcacccctgaggagaggctgaaggtggccattaccatgctgacagccagagggattatccggtttgtcattggctttagcttgccgatgtccattgttgccatctgctatgggctcattgcagccaagatccacaaaaagggcatgattaaatccagccgtcccttacgggtcctcactgctgtggtggcttctttcttcatctgttggtttccctttcaactggttgcccttctgggcaccgtctggctcaaagagatgttgttctatggcaagtacaaaatcattgacatcctggttaacccaacgagctccctggccttcttcaacagctgcctcaaccccatgctttacgtctttgtgggccaagacttccgagagagactgatccactccctgcccaccagtctggagagggccctgtctgaggactcagccccaactaatgacacggctgccaattctgcttcacctcctgcagagactgagttacaggcaatgtgaggatggggtcagggatattttgagttctgttcatcctaccctaatgccagttccagcttcatctacccttgagtcatattgaggcattcaaggatgcacagctcaagtatttattcaggaaaaatgtttttgtgtccctgatttggggctaagaaatagacagtcaggctactaaaatattagtgttattttttgttttttgacttctgcctataccctggggtaagtggagttgggaaatacaagaagagaaagaccagtggggatttgtaagacttagatgagatagcgcataataaggggaagactttaaagtataaagtaaaatgtttgctgtaggttttttatagctattaaaaaaaatcagattatggaagttttcttctatttttagtttgctaagagttttctgtttcttttttcttacatcatgagtggactttgcattttatcaatgcattttctacatgtattaagatggtcatattattcttcttcttttatgtaaatcattataaataatgttcattaagttctgaatgttaaactactctt

SEQ ID NO: 33 - DNA, 1134 bp, Homo sapiens
  source 1..1134: mol_type = other DNA
atggcagcagacctgggcccctggaatgacaccatcaatggcacctgggatggggatgagctgggctacaggtgccgcttcaacgaggacttcaagtacgtgctgctgcctgtgtcctacggcgtggtgtgcgtgcttgggctgtgtctgaacgccgtggcgctctacatcttcttgtgccgcctcaagacctggaatgcgtccaccacatatatgttccacctggctgtgtctgatgcactgtatgcggcctccctgccgctgctggtctattactacgcccgcggcgaccactggcccttcagcacggtgctctgcaagctggtgcgcttcctcttctacaccaacctttactgcagcatcctcttcctcacctgcatcagcgtgcaccggtgtctgggcgtcttacgacctctgcgctccctgcgctggggccgggcccgctacgctcgccgggtggccggggccgtgtgggtgttggtgctggcctgccaggcccccgtgctctactttgtcaccaccagcgcgcgcgggggccgcgtaacctgccacgacacctcggcacccgagctcttcagccgcttcgtggcctacagctcagtcatgctgggcctgctcttcgcggtgccctttgccgtcatccttgtctgttacgtgctcatggctcggcgactgctaaagccagcctacgggacctcgggcggcctgcctagggccaagcgcaagtccgtgcgcaccatcgccgtggtgctggctgtcttcgccctctgcttcctgccattccacgtcacccgcaccctctactactccttccgttcgctggacctcagctgccacaccctcaacgccatcaacatggcctacaaggttacccggccgctggccagtgctaacagttgccttgaccccgtgctctacttcctggctgggcagaggctcgtacgctttgcccgagatgccaagccacccactggccccagccctgccaccccggctcgccgcaggctgggcctgcgcagatccgacagaactgacatgcagaggatagaagatgtgttgggcagcagtgaggactctaggcggacagagtccacgccggctggtagcgagaacactaaggacattcggctgtag

SEQ ID NO: 34 - DNA, 987 bp, Homo sapiens
  source 1..987: mol_type = other DNA
atggaatgggacaatggcacaggccaggctctgggcttgccacccaccacctgtgtctaccgcgagaacttcaagcaactgctgctgccacctgtgtattcggcggtgctggcggctggcctgccgctgaacatctgtgtcattacccagatctgcacgtcccgccgggccctgacccgcacggccgtgtacaccctaaaccttgctctggctgacctgctatatgcctgctccctgcccctgctcatctacaactatgcccaaggtgatcactggccctttggcgacttcgcctgccgcctggtccgcttcctcttctatgccaacctgcacggcagcatcctcttcctcacctgcatcagcttccagcgctacctgggcatctgccacccgctggccccctggcacaaacgtgggggccgccgggctgcctggctagtgtgtgtagccgtgtggctggccgtgacaacccagtgcctgcccacagccatcttcgctgccacaggcatccagcgtaaccgcactgtctgctatgacctcagcccgcctgccctggccacccactatatgccctatggcatggctctcactgtcatcggcttcctgctgccctttgctgccctgctggcctgctactgtctcctggcctgccgcctgtgccgccaggatggcccggcagagcctgtggcccaggagcggcgtggcaaggcggcccgcatggccgtggtggtggctgctgcctttgccatcagcttcctgccttttcacatcaccaagacagcctacctggcagtgcgctcgacgccgggcgtcccctgcactgtattggaggcctttgcagcggcctacaaaggcacgcggccgtttgccagtgccaacagcgtgctggaccccatcctcttctacttcacccagaagaagttccgccggcgaccacatgagctcctacagaaactcacagccaaatggcagaggcagggtcgctga

SEQ ID NO: 35 - DNA, 1684 bp, Homo sapiens
  source 1..1684: mol_type = other DNA
ttggcagaaagaagccagggtgtgcaagtctccccaacagcctcgagtggcctgcagtcacagggaaccctcaggaagaccttccgggcagagaccagagggaagcccatctctccagcagaactgcttggatttttctaccaggaggctcagggctctgcaacaatgatagcagaagctgatggcatctagagatctaggctgggactagcacagcatcacttctaccactttctgttggtcacagcaactcaccatgccagtgcagattcaaggggaggagaaatagagtccacttcttgatgggaggcgtgacatgtgtttctagctgtgtacagggactgattggctgaggactcacattggagagctgcagacaacataacggtgaatgagaatggaggatgaagattacaacacttccatcagttacggtgatgaataccctgattatttagactccattgtggttttggaggacttatcccccttggaagccagggtgaccaggatcttcctggtggtggtctacagcatcgtctgcttcctcgggattctgggcaatggtctggtgatcatcattgccaccttcaagatgaagaagacagtgaacatggtctggttcctcaacctggcagtggcagatttcctgttcaacgtcttcctcccaatccatatcacctatgccgccatggactaccactgggttttcgggacagccatgtgcaagatcagcaacttccttctcatccacaacatgttcaccagcgtcttcctgctgaccatcatcagctctgaccgctgcatctctgtgctcctccctgtctggtcccagaaccaccgcagcgttcgcctggcttacatggcctgcatggtcatctgggtcctggctttcttcttgagttccccatctctcgtcttccgggacacagccaacctgcatgggaaaatatcctgcttcaacaacttcagcctgtccacacctgggtcttcctcgtggcccactcactcccaaatggaccctgtggggtatagccggcacatggtggtgactgtcacccgcttcctctgtggcttcctggtcccagtcctcatcatcacagcttgctacctcaccatcgtgtgcaaactgcagcgcaaccgcctggccaagaccaagaagcccttcaagattattgtgaccatcatcattaccttcttcctctgctggtgcccctaccacacactcaacctcctagagctccaccacactgccatgcctggctctgtcttcagcctgggtttgcccctggccactgcccttgccattgccaacagctgcatgaaccccattctgtatgttttcatgggtcaggacttcaagaagttcaaggtggccctcttctctcgcctggtcaatgctctaagtgaagatacaggccactcttcctaccccagccatagaagctttaccaagatgtcatcaatgaatgagaggacttctatgaatgagagggagaccggcatgctttgatcctcactgtggaacccctcaatggactctctcaacccagggacacccaaggatatgtcttctgaagatcaaggcaagaacctctttagcatccaccaattttcactgcattttgcatgggatgaacagtgttttatgctgggaatctagggcctggaacccctttcttcg

SEQ ID NO: 36 - DNA, 14287 bp, Homo sapiens
  source 1..14287: mol_type = genomic DNA
gcgggtaggcgcgggagcctcgagcgccgctcggatgcagcagccgagccgccactcggcgcgcggcgggagacccagggcaagccgccgtcggcgcgctgggtgcgggaagggggctctggatttcggtccctcccctttttcctctgagtctcggaacgctccggctctcagaccctcttcctcccaggtaaaggccgggagaggagggcgcatctcttttccaggcaccccaccatgggcaatgcctccaatgactcccagtctgaggactgcgagacgcgacagtggcttcccccaggcgaaagcccagccatcagctccgtcatgttctcggccggggtgctggggaacctcatagcactggcgctgctggcgcgccgctggcggggggacgtggggtgcagcgccggccgcaggagctccctctccttgttccacgtgctggtgaccgagctggtgttcaccgacctgctcgggacctgcctcatcagcccagtggtactggcttcgtacgcgcggaaccagaccctggtggcactggcgcccgagagccgcgcgtgcacctacttcgctttcgccatgaccttcttcagcctggccacgatgctcatgctcttcgccatggccctggagcgctacctctcgatcgggcacccctacttctaccagcgccgcgtctcgcgctccgggggcctggccgtgctgcctgtcatctatgcagtctccctgctcttctgctcgctgccgctgctggactatgggcagtacgtccagtactgccccgggacctggtgcttcatccggcacgggcggaccgcttacctgcagctgtacgccaccctgctgctgcttctcattgtctcggtgctcgcctgcaacttcagtgtcattctcaacctcatccgcatgcaccgccgaagccggagaagccgctgcggaccttccctgggcagtggccggggcggccccggggcccgcaggagaggggaaagggtgtccatggcggaggagacggaccacctcattctcctggctatcatgaccatcaccttcgccgtctgctccttgcctttcacggtaagtcactccctacgtttccacagcccggctctgctcagccttctcatgctctcccctgacgcctccaccctttccaccgccctacaaactttttgcaacttgtaaaaatatgtcctaatttgtaaagatctgtagccttccccactagtttcccctcctctttagcccacttccttatcctggcttatgggcgttgctaggctagagtttcttatacaataatacagaccgtccgaaagggagtcctgggcctcagctaagctagccaatctcctcatcctagccctgggcagtgtccctttctcgctgttgcctatcttggcttagtaattgagaaagaggcagccccttccaccttaggatggctgtcactgttccagcctgacgacctggagctgcagtttgctgccctgtacctctcatccactggtgctggttctccatgcttgccttctgttcctgccagggcaaaatgtagtacccaacccatagcattccagctgccattgaaaatggtcccagatgagaagggtccctgaagcagaagtttagagcatttgttatttgtcctaaaagtccaacaaacatctagtttataggtttcccaatttatatatttgaatgtaactctttgtggccatgaaagtttataaaaccataatgataactagaggaaatacttggaggaacatcttgctaagcatttgtaatatcttgcaaaacacgctcttaatgtcactgtcagaaatacacacaggtgtccttcagcttacagttatgcacttgatgagcacaaagccacaggcaggaatggctggtccctctcaggaagggaagagtggggctacctggggaactgaaggacaagagaccaagtcctggcatcgtgctgccttgatttggggcaactttagcagttatttgatgctaactaactgctaaatgatatgaggctgtgagttcaagtctcctcaagtgtaacgttttagctgagcctggaatatgtccgagaatgtgctggcctcttacgggggctaggaattgggagttgtggcaactccacttcctaatcttcagaagagcaagactgatgctgcagcatcaaagcagttaatagtgacttccacctgccacaatcttggagaaaagagatgggcagtgcctactattaacaggtctgacctgtaaaagctggaggagaagtaactttatcctatctcctgcctccattactgcttcttacatcttcatgtgctcatcctcagggatgggaagggacacagggtcccaaaggtctgaatatgattctctcctccccagcccagttaactcccttagctacgttctcttctccctggtccccactgtcctcacccttctaccccatcctctgtcagggcagaaactgttctgaattggttacactttgagggaatgagatagaatattcaaagacgccctcttataaaatgaagtcggactgtgggaggctgcatctcccataccactctgagcaggggagtttatgcaacagaaacgctgtgatgtagaaacccacatggcttatatgcttttgatttattttactggtaggagcttttgattatgttaggagctaaatcagcttttgaaggtcagcactaggatgcagaacatatatctatgaaagaaagcatttcaagttccaccaaacagctttgcattcagcttggggatcagaaactattcctgaaagactgtcttagggtgttgggaattaagataatcagttcttagggttttatctgtcatttgtgagtatatttataaaaatatcccccactatcagctacttaaatagcctgggaatgggtttggggtgataacacacttgtgaaacgatttttagtctctttcctacacgagcaagaggaaaaagttctcctctttgatcatgactgacccattgcataaactgtattttttttaaataaaggtagtggtttccaacaggttgccctgttttcatgtaaattggccttttaccatgagaattccatcgttgccttatgtttttgtaaattcaaatatatgtgtgtggatatagatatagatattgttttccctccctcagttaatattaggccaagggctgctccagagttgccagatagaaggggcttagccacagaaatctggctaaaaggtgttgagggagtaggagctttgctttgaagctgtgtttttatttcaatttcctgtttatggcttagggggagccagatggagactatgaaggggctttagctcccccaaaccacctctaagcattgacactatcagcaaactgcttttgcttctggcaaagattcccaaagagccggagaaaatcctagtgtgaacataatcagaaagccagcctccctgacttccattgttggagctaccatgacaccatattcagatgaactatacacaaaatggaaattggaagcattgtcacctcttagtaagaaaatttatattgaccactgatggattttattttgtcaatagattattgggaataattgctagtatctttcacttacatagcactttaagctttatgaaatgctgtactatcttgatttaagttatttcttgaagggcttatctgaaaattcaagctcatggctactgtttggttcatacattctgctgttcagaatccttggcatgtgcctccaggggaggttgctttttcctccaagtccttttattctacttggcccacactaaaattgtggtcagaagtggcctataccaatctcccacctgaagcaggaatcatttccacatgtcctaacagggggctctagaagcaaaggtttatggttgccttcagaaatgtttctgtttctctaacggagtgcacatgatctgatagaaatacagtgtgaaccacaaatgcaagccacaaacggaattttaaatgttctagtagtcatataacaaaaagtaaaaagaaacagagaaaattaattgaattacatattttatttaacccaatatatctaaaatattatcaattcaaaatattagttatgtaaaataattattaataagctattccaagtaagtttcttccttgtatcccagaaaatagtagcaatctactctatctcttcccactccttcctcaggataacaagctgctttctttgtccctcaaaagtggaccaaaccactggcaacaaggaggacagctgtacccagtgggacaccagtctattccacagcactccagtagtggacagaggagggaaatgggggaattcagaaacctagaactactaatgtcaggcattgtcccaaggtttgggcaggttggaattactgcttcctccaaagatgccagtctagggcttccaaaattttggaagtaaaactgtagttttttttaaaggcccagtcccttcaagtgaagtccaattcaacctcatatgtcattattatcgaccacaaaatcagacttttgaatgctaacttttgcattaacccattatcttcacagcaccgtaggaaatagtatgatgatttctatcgtacagacgaggcaaatgactcaccctgtgtcccacagctaatgggtggtggaactgggactcaaagctaggcaatttaagcactgagccaattaacctaaccacaacactatccaagagaaagtactcatttcaggggtaacagatgagaagattaatctaagatttcataaaagagctgtgagaatgttataaatatctggaccactttgcctcttaattccaactagttagctttaaaaataaaatggcaaagacctttttcttcatgtcagctcaagggagctgagccagggccaactatgtggttccctttcttttctccacagacctatgaaataaaaggctgagactcagattctaggagattggctaatgtaaatgctggtctaaattaagaaataatcagattatccctcacataaaatctttcatcagaacaaataaaacatctcttaagtgaccaaaaaccatgtggtgtttgggaaatgacattattttggctgcccagtatgaaattctgcatggaaccaacaacatattccaaactgtttattcactaaagggatattgtataaattaataaattcctccttatgttaatcagctttgccatcgttttacagagataaatagaaactttcttcctgaaatggaacagaacacaggaaatatatgagacctctattcttgcctcagatactgtttgtgtcttcatatccaactcatatcaagcccctttctcgccacttttctaattgtggatagcttctggccattttaaactgttttccacatgccatgaggataaagtgcttatgtatttttattcagttctaaaatttcaagagtaaaccattgactcatactaaaaagttctccatctttagaaattctttagggttataacttctaggtaaatctgattagtggaaatctgatcttggcaatacaaaacaaactccagtaaacagtactagagtttccttttcattcctggtactcattatgtaaaatataacatgaatgggggttgaaaagctgatatgacattggtagattatatacatgccaaatataacaattctggtaggaatgaaaaagaactccagacatctctacgtataaccacaatgaactttgcctggtgatagtttaagttaatgtccataaacaactggaaggccctttatcatttaagcatcattaaccatgtgtttggggatcgatgagacagttttaatacacatgatgttttaagagaaagttcctctatatgagtgttttcacttgacgtcttttctcctttgccatttgatattatgaatgctgatttgaataaagacacaattacactggttttaaaaatgtaaacagaaagaaccttagttcttttcccaaaagagaatttgtgcattatgtccacacctttggtcaagtgggtcctcactgctatctcagatggtttagaccaggtcctcagcttaaagagaaacaccttctggagatggtatatttcttctttggcatatcaaaaaccaatcacagtattaagtttaaaaaaagaatagaaatggtgagaccgtgtttcaggaaggcaatgaacaggtctctttccagctagaggcttaagacccagttcatctgcaactcagtctgctcagttggcttctcctgtcctgttttgaaatttctgaccctctactccctgtccttatcttgagctcaagtccattgtacctcagtttatattatcaaggtgtaccaagctccatttttctgagaatattttgctgcctaaaactgcccctaacagaaaactaaacctaagaaccttgcagctgggacatacatgtgatggaaagggccagggatcggataagcacatttagaaaggctgaaagttcctctagagcagggtccataacctgtgctgcatggaaagtgcctggattttctgcctgaattcatttgcaaaaacgtttatatgagtttatgtttatatgtttgtatgagttgtgggtagatggttcatagtgtccatcagtttgtcaaagagttaagagccaccatcttggaataaataggcccagaggtctaaaccttagcatttgctctttttttgtttccagttctgagaagcacaagacaaaggacactagtcctggagccacatggatccagtttttcctattgcaggaaaataggcttctgtttccctctaccacaaagcacctgtgattcaggcaaagggacttctttaaagcatcatatacctgaaaaataatctccccccaaaatgtttttttttaaagaatgaattaggcaaagtctatagtcaggacaccttagtgtctttcagaaggcaggtaaacatataacaatctatgcttgcaatttagctgtggaaaagtgtggaggaaaaacaagtcccagagaaagctaagtagctacttagaaatagccatggtttttcagtccataaacaggaaccatgatatccataaacttttgaagagaaatctttgaagagaaatctcctccaaacccataatgtggtcagacatttgtgaatttcatgctaagctttacattacaggctttttatatagatggcagcagagtgtctagtggctaaaagccaagtttggtgtcccatggattcagtttgactccacattttctctacttacccagactgtaattctatgcaaagtaactgatcttctaaaccttcatttccttctaacataggaataataatacttcgtaggtttatgtaaatattaaacaaaatatgccttataaattgcttggcaccatgcctaacacacagtaggtgtttaataaatgttagctgctatctctaggggattccatttcaagggaaaatcagattgtatattaatggtcaggaaatgaattctgaaagctcaaagtcatttgtttgattgacctaagtgggccttttgtttttaagtgtgataaatgaataattttaaactattccaggttttagataaggttctaaagggatgtctcacaccctggctgcatattaaaattacttggagcactttgcaaaccttgatgcccatggctcagcctagactaattaagttggagtctctgggtatcgggggaactcacccccaatatttcaacttaggttctttctattttccataagtgttggccggctgagaaagagaaagagtacgaagagaggaattatacagctgggccgctgggggtgacatcacatatctgtaggaccatgatgcccacctgagctgcaaaatcagcacgtttttattaaggatttcaaaaggggagggggtgtaagcagggagtaggtcacaaagatcacatgcttcaaaggggaaaaaggagaacaaagatcacatgcttctgaggaaacaggacaagggcaaaatcagaaactcctgataagagtccaacaaagatcacaaggcaaagggcaaaagcaaagatcacaaggcaaagggcaaaagcagaattactgataagggtctatgttcagtggtgcacgtattgtcttgataaacatcttaaacaacagaaaacagggttcgagagcagagaaccagtctgacctcaaattaaccagggtgggtttttttccccaccctagtaagcctgagggtactgcaggagaccagggcgtatttcagtccttatctcaaccgcataagacagacactcccagagcggccgtttatagacctccccccaggaatgcattccttctccagggtattaattattaatattctttgctaggaaaagaatttaacaatatcttccctacatgcatgtcagtttataggctctctgcaagaagaaaaatacggctctattttgcccgaccccacagccagtcagaccttgtggttttcttcccttgttccctgaaaatcgctgttattctgttctttttcaaggtgcactgatttcatattgttcaaacacatatgttttacaatcaatttgtacagttaacacaaatatcatagtggtcctgaggtgacgtacatcctcagcttacgaagataacaggattaagagattaaagtaagacaggcgtaagaaattataagagtattatttgggaacggataaatgtccatgaaatcttcacaatttatattcctctgccgcggctccaaccagtccttccatttggggtccctgacttcctgcaacatctggggaagggagaaatgcctcagaatatttttatgcatgtatgtatgtatgtatgtgtgtatgtatgtatgtatttattttgagacagagactcactctgtcacccaggctgaaatgcagtggtgtgatctcagcttactacaacctctgcctcctaggttcaagcaatccttcccctcagccttccaagtagctgggattacaggtgcccaccaacacgcctgggtaatttttgtattttttagtagagatgtagtttcaccatgttggccaggctggtctcaaacttctcacctcaggtgacctgcctgcctcggcctcccaaagtgctaggattacaggcgtgagccaccgcacccaacctatttttaaagctcctcaggtgatttcaatgatcggccaaataaagccctcatttgctctaaaattctgaacccactttgtaattgcattaaagatagaaaagtagcgcaaaagaatagtacctggtcagtgccaaaatgaagttttctatgggaggctgcttctatacatgacaatgctaaaatagcactaattctcatctgtgccactttgtaaatgtcacaacaaggctttaccttcttaacaaagccctgtagagacagcctgccctgaggaattaaaattcacttgactcattgggattagcacttggtatttttctcataacaaatacattggtagtgcacacaaaaagatggataacttctaccaacctctgaaactgaattgccgaatatcactgacatattattaattaattatcttatatcctttgtgacatcctttaactaaaaactcaggactggccggagggagaggagaatgggcagttattgtttaatgggtacagagtttcaatttgggatgatgaaaataattctggagatggtagtgatggttgctgttctttgttcttttacgtggatgcagtcaagtgcatccacaagaagagacacaggagatgttcaggaaaacacagacatggtggaccactcagggccacatgaaaaagcatcggtttcagtcaggaggcagagaggcaggagggtggggaggacctgggccaagcctttattggagtttccacaagaaaggcagagcagggtaaacagtttaggattggttaggttgaataatttcagcaggctctaagctataggggtggtccctagttgcctggtacctggcattggaatgataaaagcagaggaataaatatttccttgatagaagagttctggccctggataggttagtctgtatatcaaagacatgctcccagcctaactctttgctatctctacaaattagctagccccggaggggcattctctcccagccaagaagaatttaagatgtcaaagcataatatgcagaaaagtgaaaatataaacaatatgattgccccacaatgtaaatgtatttaatgtatagctgaaaatggcaaaatggtaaattttatgttatatttattttaccacaattttttaaaatcccagtatccataagatcaaaaatatagtaatctaggcaaaagacaagaaccaaaagaaaaaaatggggaggtagaagacaaaacttacatcaagaatttcgagggtcactgaagtatgtctcttctccaagtataaaagaaggaactggctgggcgcagtggctcacacctgtaatcccagcacttcgggaggccaaggcaggcagatcacttgaggtcaggagttcaagaccagcctgtccaacatggtgaaaccccatctctactaaaaatacaaaaattagccaggcgtggtggcgggtgcctgtaatcccagctactcaggaggctgcagcaggagaatcacttgaacgcaggaggcagaggttgcagtgagtggagatcacgccactgcactctatcctgggcgacagagtgagactccatctcaaaaaaaaagccgtcttctacaaaatattggtcacctccaaagtgcaaattttaagcaattctcaaaattacccagcatagtagatgataaaggaaaggaaacagtacagaattgcttcatcctctacaaccaattttcacttctcattattctgtcacgctctaaagacattcaggaactctgatgtgggttattctcccctgaaaacctgactcatcttaatgtgtgaagctgcaacaccagaggctatgccttttctgcacttcttggctggccaattcagtgtgaatatgttctctggttaaactagatcatcaactcagctgcaggccctttctacaggagtgctcagttatgcatcatgtgcacacgtgtgtgtgcatatgtaatcactaatatgtgttttaatctgtagacctatgtgcatcattatcctgaatttcttacctccaaatcactcttttaacacaccagcctgtgtagttttcatccaaaatagtttaactgacaagaaagctattgctccattgcacctcctcacctagctttcctctactctctgggaaacccaccatcaattcttctttttccttactcatctgccaaatcttttctccattccctatgccaagattctccggcataaacacctatggctgccaaaccttcctgctcttgtcccaacataagcaaactgaagatgactaccctttgcgctctctgcaatttgctttgtatatccagttgccagatgcctgcagagtaagtactcagagaagggaaacaagctgctccttcttctgcagaaggcgagtgaagaaaagaggggctaggtgtctaaagccattggtaagaaagaccctggagccttataaagcactggttttaaatgactaggtgtgatctacctttgttttcctcttttctgtgaattttgtagaagtgtgatctttatcaagatgcattattccattccttccaacctgcccaaacatttatgttgctccctaaataactaagaaatcgtttgagggctggtagagcagtttggtccatatgtaaagatgtgtcagctttccagtgttcaggacattgttctgaggcctttgctctaatacaggcctgcacgtagcacacagtgagcactgcactggcatcaggagagttggaatttgcatcctgatttggccactaaccagctctgggtacttgagcaaattatctaattttctataccccagtgtctgcatttgtaaaatggatataataacaatgaacactgtggagcacttaggatgtgagcactgatctaagtagcttacacatatcacttcctatcatcctttcagcaactctatgaagtgggtatgttattattatcacccattttaaagatgtcaaaactgaggcacaaaggttcattattaatatcttgccattgatctcaaactatatacagaggtaggattcaaacccagtccaatggccagaactcatactcccactcagggtgttccattgcagaccctgtctcgctgaattgtgatcattagatttagtatttggaagtaaatgtaacatgttattagttttcctgaagttcacttccctatctgttaaaaagagacaatctctaagtttcagagtttctataaggagtagagataaagcggggttagtacccagaacaattcatgacacatatattaggttattgatacactggagctactaatattatcattattatttatattgttaaaagattctattctagatgacaagaaaagtttatttctctccactcccaatgacaccaagacattgtgcatggtgttaatgttaattgcattccacagaaaacatgctttcattgagttcaaggggaaaaaatacattcattatgttacagtttacataaggaagaaaggtaagattcccaacccccacctttcgttccccaccactaccacagacaaaacatggttttgcttttaaatctcaagacataacatagggtctaagcctgtctactgctacgatgtaaaactaacatcatttttcccctttgcttcttacagatttttgcatatatgaatgaaacctcttcccgaaaggaaaaatgggacctccaagctcttaggtttttatcaattaattcaataattgacccttgggtctttgccatccttaggcctcctgttctgagactaatgcgttcagtcctctgttgtcggatttcattaagaacacaagatgcaacacaaacttcctgttctacacagtcagatgccagtaaacaggctgacctttgaggtcagtagtttaaaagttcttagttatatagcatctggaagatcattttgaaattgttccttggagaaatgaaaacagtgtgtaaacaaaatgaagctgccctaataaaaaggagtatacaaacatttaagctgtggtcaaggctacagatgtgctgacaaggcacttcatgtaaagtgtcagaaggagctacaaaacctaccctcagtgagcatggtacttggcctttggaggaacaatcggctgcattgaagatccagctgcctattgatttaagctttcctgttgaatgacaaagtatgtggttttgtaatttgtttgaaaccccaaacagtgactgtactttctattttaatcttgctactaccgttatacacatatagtgtacagccagaccagattaaacttcatatgtaatctctaggaagtcaatatgtggaagcaaccaagcctgctgtcttgtgatcacttagcgaaccctttatttgaacaatgaagttgaaaatcataggcaccttttactgtgatgtttgtgtatgtgggagtactctcatcactacagtattactcttacaagagtggactcagtgggttaacatcagttttgtttactcatcctccaggaactgcaggtcaagttgtcaggttatttattttataatgtccatatgctaatagtgatcaagaagactttaggaatggttctctcaacaagaaataatagaaatgtctcaaggcagttaattctcattaatactctttatttatcctatttctgggggaggatgtacgtggccatgtatgaagccaaatattaggcttaaaaactgaaaaatctggttcattcttcagatatactggaacccttttaaagttgatattggggccatgagtaaaatagattttataagatgactgtgttgtaccaaaattcatctgtctatattttatttagggaacatggtttgactcatcttatatgggaaaccatgtagcagtgagtcatatcttaatatatttctaaatgtttggcatgtaaatgtaaactcagcatcaaaatatttcagtgaatttgcactgtttaatcatagttactgtgtaaactcatctgaaatgttacaaaaataaactataaaacaaaaa

SEQ ID NO: 37 - DNA, 3045 bp, Homo sapiens
  source 1..3045: mol_type = genomic DNA
ctttcacttaggcatcgatagcacccatcagatggccaaatcattatttactggaccaggccttttcaaaactatcaagcagatagtcagggcctgtgaagtgtgccagagaaataatcccctgccttatcgccaagctccttcaggagaacaaagaacaggccattaccctggagaagactggcaactgattttacccacaagcccaaacctcagggatttcagtatctactagtctgggtagatactttcacgggttgggcagaggccttcccctgtaggacagaaaaggcccaagaggtaataaaggcactagttcatgaaataattcccagattcggacttccccgaggcttacagagtgacaatagccctgctttccaggccacagtaacccagggagtatcccaggcgttaggtatacgatatcacttacactgcgcctgaaggccacagtcctcagggaaggtcgagaaaatgaatgaaacactcaaaggacatctaaaaaagcaaacccaggaaacccacctcacatggcctgctctgttgcctatagccttaaaaagaatctgcaactttccccaaaaagcaggacttagcccatacgaaatgctgtatggaaggcccttcataaccaatgaccttgtgcttgacccaagacagccaacttagttgcagacatcacctccttagccaaatatcaacaagttcttaaaacattacaaggaacctatccctgagaagagggaaaagaactattccacccttgtgacatggtattagtcaagtcccttccctctaattccccatccctagatacatcctgggaaggaccctacccagtcattttatctaccccaactgcggttaaagtggctggagtggagtcttggatacatcacacttgagtcaaatcctggatactgccaaaggaacctgaaaatccaggagacaacgctagctattcctgtgaacctctagaggatttgcgcctgctcttcaaacaacaaccaggaggaaagtaactaaaatcataaatccccatggccctcccttatcatatttttctctttactgttcttttaccctctttcactctcactgcaccccctccatgccgctgtatgaccagtagctccccttaccaagagtttctatggagaatgcagcgtcccggaaatattgatgccccatcgtataggagtctttctaagggaacccccaccttcactgcccacacccatatgccccgcaactgctatcactctgccactctttgcatgcatgcaaatactcattattggacaggaaaaatgattaatcctagttgtcctggaggacttggagtcactgtctgttggacttacttcacccaaactggtatgtctgatgggggtggagttcaagatcaggcaagagaaaaacatgtaaaagaagtaatctcccaactcacccgggtacatggcacctctagcccctacaaaggactagatctctcaaaactacatgaaaccctccgtacccatactcgcctggtaagcctatttaataccaccctcactgggctccatgaggtctcggcccaaaaccctactaactgttggatatgcctccccctgaacttcaggccatatgtttcaatccctgtacctgaacaatggaacaacttcagcacagaaataaacaccacttccgttttagtaggacctcttgtttccaatctggaaataacccatacctcaaacctcacctgtgtaaaatttagcaatactacatacacaaccaactcccaatgcatcaggtgggtaactcctcccacacaaatagtctgcctaccctcaggaatattttttgtctgtggtacctcagcctatcgttgtttgaatggctcttcagaatctatgtgcttcctctcattcttagtgccccctatgaccatctacactgaacaagatttatacagttatgtcatatctaagccccgcaacaaaagagtacccattcttccttttgttataggagcaggagtgctaggtgcactaggtactggcattggcggtatcacaacctctactcagttctactacaaactatctcaagaactaaatggggacatggaacgggtcgccgactccctggtcaccttgcaagatcaacttaactccctagcagcagtagtccttcaaaatcgaagagctttagacttgctaaccgctgaaagagggggaacctgtttatttttaggggaagaatgctgttattatgttaatcaatccggaatcgtcactgagaaagttaaagaaattcgagatcgaatacaacgtagagcagaggagcttcgaaacactggaccctggggcctcctcagccaatggatgccctggattctccccttcttaggacctctagcagctataatattgctactcctctttggaccctgtatctttaacctccttgttaactttgtctcttccagaatcgaagctgtaaaactacaaatggagcccaagatgcagtccaagactaagatctaccgcagacccctggaccggcctgctagcccacgatctgatgttaatgacatcaaaggcacccctcctgaggaaatctcagctgcacaacctctactacgccccaattcagcaggaagcagttagagcggtcgtcggccaacctccccaacagcacttaggttttcctgttgagatgggggactgagagacaggactagctggatttcctaggctgactaagaatccctaagcctagctgggaaggtgaccacatccacctttaaacacggggcttgcaacttagctcacacctgaccaatcagagagctcactaaaatgctaattaggcaaagacaggaggtaaagaaatagccaatcatctattgcctgagagcacagcaggagggacaatgatcgggatataaacccaagtcttcgagccggcaacggcaaccccctttgggtcccctccctttgtatgggagctctgttttcatgctatttcactctattaaatcttgcaactgca

SEQ ID NO: 38 - DNA, 9472 bp, Homo sapiens
  source 1..9472: mol_type = genomic DNA
tgtggggaaaagcaagagagatcagattgttactgtgtctgtgtagaaagaagtagacataggagactccattttgttatgtactaagaaaaattcttctgccttgagattctgttaatctatgaccttacccccaaccccgtgctctctgaaacatgtgctgtgtcaactcagagttgaatggattaagggcggtgcaggatgtgctttgttaaacagatgcttgaaggcagcatgctccttaagagtcatcaccactccctaatctcaagtacccagggacacaaaaactgcggaaggccgcagggacctctgcctaggaaagccaggtattgtccaaggtttctccccatgtgatagtctgaaatatggcctcgtgggaagggaaagacctgaccgtcccccagcccgacacccgtaaagggtctgtgctgaggaggattagtataagaggaaggaatgcctcttgcagttgagacaagaggaaggcatctgtctcctccctgtccctgggcaatggaatgtctcggtataaaacccgattgtatgctccatctactgagatagggaaaaaccgcctcagggctggaggtgggacctgcgggcagcaatactgctttgtaaagcactgagatgtttatgtgtatgcatatctaaaagcacagcacttaatcctttacattgtctatgatgccaagacctttgttcacgtgtttgtctgctgaccctctccccacaattgtcttgtgaccctgacacatccccctctttgagaaacacccacagatgatcaataaatactaagggaactcagaggctggcgggatcctccatatgctgaacgctggttccccggttccccttatttctttctctatactttgtctctgtgtctttttcttttccaaatctctcgtcccaccttacgagaaacacccacaggtgtgtaggggcaacccacccctacatctggtgcccaacgtggaggcttttctctagggtgaaggtacgctcgagcgtggtcattgaggacaagtcgacgagagatcccgagtacgtctacagtcagccttacggtaagcttgtgcgctcggaagaagctagggtgataatggggcaaactaaaagtaaaattaaaagtaaatatgcctcttatctcagctttattaaaattcttttaaaaagagggggagttaaagtatctacaaaaaatctaatcaagctatttcaaataatagaacaattttgcccatggtttccagaacaaggaactttagatctaaaagactggaaaagaattggtaaggaactaaaacaagcaggtaggaagggtaatatcattccacttacagtatggaatgattgggccattattaaagcagctttagaaccatttcaaacagaagaagatagtgtttcagtttctgatgcccctggaagctgtataatagattgtaatgaaaagacaaggaaaaaatcccagaaagaaaccgaaagtttacattgcgaatatgtagcagagccagtaatggctcagtcaacgcaaaatgctgactataatcaattacaggaggtgatatatcctgaaacgttaaaattagaaggaaaaggtccagaattaatggggccatcagagtctaaaccacgaggcacaagtcctcttccagcaggtcaggtgcccgtaacattacaacctcaaaagcaggttaaagaaaataagacccaaccgccagtagcctaccaatactggccgccggctgaacttcagtatcagccacccccagaaagtcagtatggatatccaggaatgcccccagcaccacagggcagggcgccataccctcagccgcccactaggagacttaatcctacggcaccacctagtagacagggtagtgaattacatgaaattattgataaatcaagaaaggaaggagatactgaggcatggcaattcccagtaacgttagaactgatgccacctggagaaggagcccaagagggagagcctcccacagttgaggccagatacaagtctttttcgataaaaatgctaaaagatatgaaagagggagtaaaacagtatggacccaactccccttatatgaggacattattagattccattgctcatggacatagactcattccttatgattgggagattctggcaaaatcgtctctctcaccctctcaatttttacaatttaagacttggtggattgatggggtacaagaacaggtccgaagaaatagggctgccaatcctccagttaacatagatgcagatcaactattaggaataggtcaaaattggagtactattagtcaacaagcattaatgcaaaatgaggccattgagcaagttagagctatctgccttagagcctgggaaaaaatccaagacccaggaagtacctgcccctcatttaatacagtaagacaaggttcaaaagagccctatcctgattttgtggcaaggctccaagatgttgctcaaaagtcaattgccgatgaaaaagcccgtaaggtcatagtggagttaatggcatatgaaaacgccaatcctgagtgtcaatcagccattaagccattaaaaggaaaggttcctgcaggatcagatgtaatctcagaatatgtaaaagcctgtgatggaatgggaggagctatgcataaagctatgcttatggctcaagcaataacaggagttgttttaggaggacaagttagaacatttggaggaaaatgttataattgtggtcaaattggtcacttaaaaaagaattgcccagtcttaaacaaacagaatataactattcaagcaactacaacaggtagagagccacctgacttatgtccaagatgtaaaaaaggaaaacattgggctagtcaatgtcgttctaaatttgataaaaatgggcaaccattgtcgggaaacgagcaaaggggccagcctcaggccccacaacaaactggggcattcccaattcagccatttgttcctcagggttttcagggacaacaacccccactgtcccaagtgtttcagggaataagccagttaccacaatacaacaattgtcccccgccacaagcggcagtgcagcagtagatttatgtactatacaagcagtctctctgcttccaggggagcccccacaaaaaatccctacaggtgtatatggccccctgcctgaggggactgtaggactaatcttgggaagatcaagtctaaatctaaaaggagttcaaattcatactagtgtggttgattcagactataaaggcgaaattcaattggttattagctcttcaattccttggagtgccagtccaggagacaggattgctcaattattactcctgccatatattaagggtggaaatagtgaaataaaaagaacaggagggcttggaagcactgatccgacaggaaaggctgcatattgggcaagtcaggtctcagagaacagacctgtgtgtaaggccattattcaaggaaaacagtttgaagggttggtagacactggagcagatgtctctatcattgctttaaatcagtggccaaaaaattggcctaaacaaaaggctgttacaggacttgtcggcataagcacagcctcagaagtgtatcaaagtacggagattttacattgcttagggccagataatcaagaaagtactgttcagccaatgattacttcaattcctcttaatctgtggggtcgagatttattacaacaatggggtgtggaaatcaccatgcccgctccattatatagccccacgagtcaaaaaatcatgaccaagatgggatatataccaggaaagggactagggaaaaatgaagatggcattaaagttccagttgaggctaaaataaatcaagaaagagaaggaatagggtatcctttttaggggcggccactgtagagcctcctaaacccataccattaacttggaaaacagaaaaaccagtgtgggtaaatcagtggccgctaccaaaacaaaaactggaggctttacatttattagcaaatgaacagttagaaaagggtcacattgaaccttcgttctcaccttggaattctcctgtgtttgtaattcagaagaaatcaggcaaatggcgtatgttaactgacttaagggctgtaaacgccgtaattcaacccatggggcctctccaacctgggttgccctctccagccatgatcccaaaagattggcctttaattataattgatctaaaggattgcttttttaccatccctctggcagagcaggattgtgaaaaatttgcctttactataccagccataaataataaagaaccagccaccaggtttcagtggaaagtgttacctcagggaatgcttaatagtccaactatttgtcagacttttgtaggtcgagctcttcaaccagttagagacaagttttcagactgttatatcattcattatattgatgatattttatgtgctgcagaaacgaaagataaattaattgactgttatacatttctgcaagcagaggttgccaatgctggactggcaatagcatctgataagatccaaacctctactccttttcattatttagggatgcagatagaaaatagaaaaattaagccacaaaaaatagaaataagaaaagacacattaaaaacactaaatgattttcaaaaattactaggagatattaattggattcggccaactctaggcattcctacttatgtcatgtcaaatttgttctctatcttaagaggagactcagacttaaatagtaaaagaatgttaaccccagagacaacaaaagaaattaaattagtggaagaaaaaattcagtcagcacaaataaatagaatagatcccttagccccactccgacttttgatttttgccactgcacattctccaataggcatcattattcaaaatactgatcttgtggagtggtcattccttcctcacagtacagttaagacttttacattgtacttggatcaaatagctacattaatcggtcagacaagattacgaataataaaattatgtgggaatgacccagacaaaatagttgtccctttaaccaaggaacaagttagacaagcctttatcaattctggtgcatggcagattggtcttgctaattttgtgggaattattgataaccattacccaaaaacaaagatcttccagttcttaaaattgactacttggattctacctaaaattaccagacgtgaacctttagaaaatgctctaacagtatttactgatggttccagcaatggaaaagcagcttacacagggctgaaagaacgagtaatcaaaactccatatcaatcggctcaaagagcagagttggttgcagtcattacagtgttacaagattttgaccagcctatcaatattatatcagattctgcatatgtagtacaggctacaagggatgttgagacagctctaattaaatatagcatggatgatcagttaaaccagctattcaatttattacaacaaactgtaagaaaaagaaatttcccattttatattactcatattcgagcacacactaatttaccagggcctttgactaaagcaaatgaacaagctgacttactggtatcatctgcactcataaaagcacaagaacttcatgctttgactcatgtaaatgcagcaggattaaaaaacaaatttgatgtcacatggaaacaggcaaaagatattgtacaacattgcacccagtgtcaagtcttacacctgcccactcaagaggcaggagttaatcccagaggtctgtgtcctaatgcattatggcaaatggatgtcacacatgtaccttcatttggaagattatcatatgttcatgtaacagttgatacttattcacatttcatatgggcaacttgccaaacaggagaaagtacttcccatgttaaaaaacatttattgtcttgttttgctgtaatgggagttccagaaaaaatcaaaactgacaatggaccaggatattgtagtaaagctttccaaaaattcttaagtcagtggaaaatttcacatacaacaggaattccttataattcccaaggacaggccatagttgaaagaactaatagaacactcaaaactcaattagttaaacaaaaagaagggggagacagtaaggagtgtaccactcctcagatgcaacttaatctagcaccctatactttaaattttttaaacatttatagaaatcagactactacttctgcagaacaacatcttactggtaaaaagaacagcccacatgaaggaaaactaatttggtggaaagataataaaaataagacatgggaaatagggaaggtgataacgtgggggagaggttttgcttgtgtttcaccaggagaaaatcagcttcctgtttggatgcccactagacatttgaagttctacaatgaacccatcggagatgcaaagaaaagcacctccgcggagacggagacaccgcaatcgagcaccgttgactcacaagatgaacaaaatggtgacgtcagaagaacagatgaagttgccatccaccaagaaggcagagccgccgacttgggcacaactaaagaagctgacgcagttagctacaaaatatctagagaacacaaaggtgacacaaaccccagagagtatgctgcttgcagccttgatgattgtatcaatggtggtaagtctccctatgcctgcaggagcagctgcagctaactatacctactgggcctatgtgcctttcccgcccttaattcgggcagtcacatggatggataatcctatagaaatatatgttaatgatagtgtatgggtacctggccccacagatgattgctgccctgccaaacctgaggaagaagggatgatgataaatatttccattgggtatcgttatcctcctatttgcctagggagagcaccaggatgtttaatgcctgcagtccaaaattggttggtagaagtacctactgtcagtcccatcagtagattcacttatcacatggtaagcgggatgtcactcaggccacgggtaaattatttacaagacttttcttatcaaagatcattaaaatttagacctaaagggaaaccttgccccaaggaaattcccaaagaatcaaaaaatacagaagttttagtttgggaagaatgtgtggccaatagtgcggtgatattacaaaacaatgaattcggaactcttatagattgggcacctcgaggtcaattctaccacaattgctcaggacaaactcagtcgtgtccaagtgcacaagtgagtccagctgttgatagcgacttaacagaaagtttagacaaacataagcataaaaaattgcagtctttctacccttgggaatggggagaaaaaggaatctctaccgcaagaccaaaaataataagtcctgtttctggtcctgaacatccagaattatggaggcttactgtggcctcacaccacattagaatttggtctggaaatcaaactttagaaacaagagatcgtaagccattttatactatcgacctaaattccagtctaacagttcctttacaaagttgcgtaaagcccccttatatgctagttgtaggaaatatagttattaaaccagactcccagactataacctgtgaaaattgtagattgcttacttgcattgattcaacttttaattggcaacaccgtattctgctggtgagagcaagagagggcgtgtggatccctgtgtccatggaccgaccgtgggaggcctcaccatccgtccatattttgactgaagtattaaaaggtgttttaaatagatccaaaagattcatttttactttaattgcagtgattatgggattaattgcagtcacagctacggctgctgtagcaggagttgcattgcactcttctgttcagtcagtaaactttgttaatgattggcaaaataattctacaagattgtggaattcacaatctagtattgatcaaaaattggcaaatcaaattaatgatcttagacaaactgtcatttggatgggagacaggctcatgagcttagaacatcgtttccagttacaatgtgactggaatacgtcagatttttgtattacaccccaaatttataatgagtctgagcatcactgggacatggttagatgccatctacagggaagagaagataatctcactttagacatttccaaattaaaagaacaaatttttgaagcatcaaaagcccatttaaatttggtgccaggaactgaggcaattgcaggagttgctgatggcctcgcaaatcttaacactgtcacttgggttaagaccattggaagtactacaattataaatctcatattaatccttgtgtgcctgttttgtctgttgttagtctacaggtgtacccaacagctccgacgagacagcgaccatcgagaacgggccatgatgacgatggtggttttgtcgaaaagaaaagggggaaatgtggggaaaagcaagagagatcagattgttactgtgtctgtgtagaaagaagtagacataggagactccattttgttatgtattaagaaaaattcttctgccttgagattctgttaatctatgaccttacccccaaccccgtgctctctgaaacatgtgctgtgtcaactcagagttgaatggattaagggcggtgcaggatgtgctttgttaaacagatgcttgaaggcagcatgctccttaagagtcatcaccactccctaatctcaagtacccagggacacaaaaactgcagaaggccgcagggacctctgcctaggaaagccaggtattgtccaaggtttctccccatgtgatagtctgaaatatggcctcgtgggaagggaaagacctgaccgtcccccagcccgacacccgtaaagggtctgtgctgaggaggattagtataagaggaaggaatgcctcttgcagttgagacaagaggaaggcatctgtctcctccctgtccctgggcaatggaatgtctcggtataaaacccgattgtatgctccatctactgagatagggaaaaaccgcctcagggctggaggtgggacctgcgggcagcaatactgctttgtaaagcattgagatgtttatgtgtatgcatatctaaaagcacagcacttaatcctttacattgtctatgatgccaagacctttgttcacgtgtttgtctgctgaccctctccccacaattgtcttgtgaccctgacacatccccctctttgagaaacacccacagatgatcaataaatactaagggaactcagaggctggcgggatcctccatatgctgaacgctggttccccggttccccttatttctttctctatactttgtctctgtgtctttttcttttccaaatctctcgtcccaccttacgagaaacacccacaggtgtgtaggggcaacccacccctaca

SEQ ID NO: 39 - DNA, 1706 bp, Homo sapiens
  source 1..1706: mol_type = other DNA
agtaaaatgtcacactgcaaactctgggcctggggtcccatgggacttcagtggttccaggactgatttcactgccatcacttatatatgatgatgcagacttcaagcatcaaagtacacaaactgaagaaactttatcctttgtatataattatcttaaatatatgccatcatttcaaggggagcttatgctaagtgtgacttcataaacaaatcatttgtgaaagagaaaaaccacatccagggtaaagtcataaggtgaaaaagcctatttcagagagcacttcctgaaagagacaaagcagcaattaaagtcagcccagcaccaactccgacgccaagcgttacactggaaactactttttaaagcaacaaaagagtctaaaacaaaatacaacatttcttaaatacactgtttccagaaagagctattttaacagaagcaactcaaagatatcccttcgacagaagtggaagtgctgaaaaatgctcatccctcacacagacttttgatggacaggagtttctaagtatcatgcctaccaacaagctgtaaaatgatcaccctgaacaatcaagatcaacctgtcccttttaacagctcacatccagatgaatacaaaattgcagcccttgtcttctatagctgtatcttcataattggattatttgttaacatcactgcattatgggttttcagttgtaccaccaagaagagaaccacggtaaccatctatatgatgaatgtggcattagtggacttgatatttataatgactttaccctttcgaatgttttattatgcaaaagatgaatggccatttggagagtacttctgccagattcttggagctctcacagtgttttacccaagcattgctttatggcttcttgcctttattagtgctgacagatacatggccattgtacagccgaagtacgccaaagaacttaaaaacacgtgcaaagccgtgctggcgtgtgtgggagtctggataatgaccctgaccacgaccacccctctgctactgctctataaagacccagataaagactccactcccgccacctgcctcaagatttctgacatcatctatctaaaagctgtgaacgtgctgaacctcactcgactgacattttttttcttgattcctttgttcatcatgattgggtgctacttggtcattattcataatctccttcacggcaggacgtctaagctgaaacccaaagtcaaggagaagtccataaggatcatcatcacgctgctggtgcaggtgctcgtctgctttatgcccttccacatctgtttcgctttcctgatgctgggaacgggggagaacagttacaatccctggggagcctttaccaccttcctcatgaacctcagcacgtgtctggatgtgattctctactacatcgtttcaaaacaatttcaggctcgagtcattagtgtcatgctataccgtaattaccttcgaagcatgcgcagaaaaagtttccgatctggtagtctacggtcactaagcaatataaacagtgaaatgttatgaataataaggttctttcatttcaatcccatcaaaattcacttcactaactactctggcgtcaatggatattctgtataatactatcaagtcccttttctcttgaaaaaataaattcattatcttcattttaaaaacttaaaaaaaaaaaaaaaa

SEQ ID NO: 40 - DNA, 1270 bp, Homo sapiens
  source 1..1270: mol_type = other DNA
ttcttgagcctaggaggtggaggctgcagtgatctgtgattgtacctttgcactccagcctgggtgacagagcatgacgctgtctctaaaagaataataataataagcattccataaaaattatggaatggagaaaccatgaatggggtctcggaggggaccagaggctgcagtgacaggcaacctggggtcctgacacgtgatcgctcttgttccaggaagatgaactcttccggatgcctgtctgaggaggtggggtccctccgcccactgactgtggttatcctgtctgcgtccattgtcgtcggagtgctgggcaatgggctggtgctgtggatgactgtcttccgtatggcacgcacggtctccaccgtctgcttcttccacctggcccttgccgatttcatgctctcactgtctctgcccattgccatgtactatattgtctccaggcagtggctcctcggagagtgggcctgcaaactctacatcacctttgtgttcctcagctactttgccagtaactgcctccttgtcttcatctctgtggaccgttgcatctctgtcctctaccccgtctgggccctgaaccaccgcactgtgcagcgggcgagctggctggcctttggggtgtggctcctggccgccgccttgtgctctgcgcacctgaaattccggacaaccagaaaatggaatggctgtacgcactgctacttggcgttcaactctgacaatgagactgcccagatttggattgaaggggtcgtggagggacacattatagggaccattggccacttcctgctgggcttcctggggcccttagcaatcataggcacctgcgcccacctcatccgggccaagctcttgcgggagggctgggtccatgccaaccggcccaagaggctgctgctggtgctggtgagcgctttctttatcttctggtccccgtttaacgtggtgctgttggtccatctgtggcgacgggtgatgctcaaggaaatctaccacccccggatgctgctcatcctccaggctagctttgccttgggctgtgtcaacagcagcctcaaccccttcctctacgtcttcgttggcagagatttccaagaaaagtttttccagtctttgacttctgccctggcgagggcgtttggagaggaggagtttctgtcatcctgtccccgtggcaacgccccccgggaatgatggaagacttcagctggaagctggaagccgtccttcttagtttgcttgtggcctcttacct

SEQ ID NO: 41 - DNA, 5298 bp, Homo sapiens
  source 1..5298: mol_type = other DNA
agtgactagctcccgcggctagcggcactgtccaccgacgagcggcgccctcttctcccccttctccccacgatttccttctctgcggcggcacgccgtccagcagcctgcttcgccccgtcgtcaactttgagctggaggagaagcaactttggcagtggccgcggggttggaatcccgcttctcctcggcagcagtaggctcgcaagtcgctggggttaggtggggcaagagtttcgccggcgcatcagcgctgcttcggactgtttgcaacgtgtttccagcgagctgggagcggggttgtgactgcgagtcgtctgggggagggggacttgtttttcttttcctctagagacctcggcttgcaactggatcaaacgctgtcgaaaggatgtaaataggcagagcaactgttaccaagaaggccaccacccccacccaaaggcagtgaggagtgtggggcttcgtctgggctcccccgagtctcaacagtaatcaacagtcaggtgttgattgcaacttttcaaggtcagccaccgggagtagcctattccctctaggaaccttggagggcataccttgctgggactcaacttggctgagaaatgcacaagatgccaaaggaggaaggattatagggggcgtgtgtgtgacccccaagaccgatcttccgctatcaccctaatctccggttccccgctacccgggcgggggtgagtatgtgacatgtgcctaactctcagcagcaacttcggcagcaggtgtcgatcctaactaagcaggagctgcggctgccgggtgtgccctcaccaagccatgcgagccccgggcgcgcttctcgcccgcatgtcgcggctactgcttctgctactgctcaaggtgtctgcctcttctgccctcggggtcgcccctgcgtccagaaacgaaacttgtctgggggagagctgtgcacctacagtgatccagcgccgcggcagggacgcctggggaccgggaaattctgcaagagacgttctgcgagcccgagcacccagggaggagcagggggcagcgtttcttgcgggaccctcctgggacctgccggcggccccgggccgtgacccggctgcaggcagaggggcggaggcgtcggcagccggacccccgggacctccaaccaggccacctggcccctggaggtggaaaggtgctcggggtcaggagccttctgaaactttggggagagggaaccccacggccctccagctcttccttcagatctcagaggaggaagagaagggtcccagaggcgctggcatttccgggcgtagccaggagcagagtgtgaagacagtccccggagccagcgatcttttttactggccaaggagagccgggaaactccagggttcccaccacaagcccctgtccaagacggccaatggactggcggggcacgaagggtggacaattgcactcccgggccgggcgctggcccagaatggatccttgggtgaaggaatccatgagcctgggggtccccgccggggaaacagcacgaaccggcgtgtgagactgaagaaccccttctacccgctgacccaggagtcctatggagcctacgcggtcatgtgtctgtccgtggtgatcttcgggaccggcatcattggcaacctggcggtgatgtgcatcgtgtgccacaactactacatgcggagcatctccaactccctcttggccaacctggccttctgggactttctcatcatcttcttctgccttccgctggtcatcttccacgagctgaccaagaagtggctgctggaggacttctcctgcaagatcgtgccctatatagaggtcgcttctctgggagtcaccactttcaccttatgtgctctgtgcatagaccgcttccgtgctgccaccaacgtacagatgtactacgaaatgatcgaaaactgttcctcaacaactgccaaacttgctgttatatgggtgggagctctattgttagcacttccagaagttgttctccgccagctgagcaaggaggatttggggtttagtggccgagctccggcagaaaggtgcattattaagatctctcctgatttaccagacaccatctatgttctagccctcacctacgacagtgcgagactgtggtggtattttggctgttacttttgtttgcccacgcttttcaccatcacctgctctctagtgactgcgaggaaaatccgcaaagcagagaaagcctgtacccgagggaataaacggcagattcaactagagagtcagatgaactgtacagtagtggcactgaccattttatatggattttgcattattcctgaaaatatctgcaacattgttactgcctacatggctacaggggtttcacagcagacaatggacctccttaatatcatcagccagttccttttgttctttaagtcctgtgtcaccccagtcctccttttctgtctctgcaaacccttcagtcgggccttcatggagtgctgctgctgttgctgtgaggaatgcattcagaagtcttcaacggtgaccagtgatgacaatgacaacgagtacaccacggaactcgaactctcgcctttcagtaccatacgccgtgaaatgtccacttttgcttctgtcggaactcattgctgaaggacagtacttggttgggtcagatttatttgtttgattttcatatcccgtgaaagtttttaattcatatttttccttatagggaaaaatgcaaaaaagaaacaataaagaaagaaatattaactactgtagaactgattttacaaattaatatttgtgctttgaaaaaaagtttctatttagttatttaagaagaatgagaaggccaatagttttagattattttatctggtatggtgctaatattttatttgaaaaaagttactgcaacttaacttaaaattgctaacgttttttcttcttttaaaaatacaattattgtatattgattatagcaatgtgattttgtaggttattttatatttgagttgtgattgaaagtatgttgtatatggtattgtgagatgatttgtacttggaagcattcacaaagtagcaccaaataaattacactttattctttaatgtcattgtcaatctacttttaaccaatattcaataaatcttctaattgccttaaagatacaattactggttctatgcacaatttaaaaccggccttactgttttataacgtattttcttttaaggcaggtaatcattatgttataaagaagtttttctaatagcagtattttatatgcatgattcataaaactatgttgtatgttaaaacaaagctgtatttttaatattcaggtatagatgtcaaattacttctgaatacttataaaatatgaataaatagcagagtaggaagaaagtttcttttttaaaaaattcacctctgaactagcacatagagctacagattttcccttggggaattatgggcagaatcaagaattttaaaatgcagttgtcatctgatttcctctgaacactgacctttgaagctttgtgaatcctacgtaaagcactctgagttctaatttttctccttttgaaaaataaacttgatgaaatctatacaacttaatttctttaagtgcaatgaaagtataggagtggaataataaaatatttatatatttttattagaacattctacctttaacttgatacttcataaactctgaataaaaaaacctaacctcctccattgggaatatttgaatcccctcttttgcctcttctggagtttaaaatgcagcagttgtgtaggatgcttgctgtgtgggacacatgtctaactcaggtggcagagaccatgacctagtgacacagtgatatttaaaagctaccaaagaagatgtgtagttggatgtctttgtcttcagaaaaatcttgttatagagaacccagttttcttgctgggaaaacgtagtttctgcttgttgatttctgttctactcggcataagtaagtcagtattcctttttccaaattataacatgatgttatttaaaaatcattaaagagattggtgcaggtgaaacttaaatggcagtgcccaggctatctcctttttcccagtccaatacttttcaaaggggtttttccctccattgtgtgtattctgtgggatctgcaggagaattcaaacaaggtgcccttgtcttcttgtagatccctgtaataggtctttggaaaatttctcaagaggacacctgagctaggttttggctgctgagcagaacagcaactgtgattccatagtgtctctcctgatatttagtcactttataaatcaaggaacaattgagcatgtcatgtggaaaagattctatcctattacctgagtaactaaaggtaaataggtcacagcctcagaccttacagaatcaggcagggatgacatggatgggaaggaataaaataaatacatagacaactatgatataagctggggcttgttaggtgcctcaggaagatgtgaagttctgcgatactttggaatagagggaatgcttatagggttagaagagagcatgaaaggctttatgagataactggatgagtgggcttttagaaggagctgatgaaagatggtgtgaggagtggacacttcaggaggagagagctaatttataaaggaatagaagaagaaatcagtgggtgtgattgaagaataaacagcccagtttgacttctgtgctacgtgtgcatagcagccttgtgggaaatattaaagaaaatatgcaccaaggccatctaataataggaccatgttttgaaagatgtttacatggtggtgcttcaggaaatggggctttgcttttaaggtttttgagtatggagaaatagtatcccagctctgcaataggaagatcaacttgcaaacagtttaaataggctggtaggggacagtctgatcatgaaaaagcaactaggaagctattataagagattgaaccacaatggaggcagcaggaacttaaatttcttttttcatttatacttgcctttcaactttttgtagttgcaacatgtactttcttattgaatcctacctctgtcaaagtggaaactttgataactcaaattgtcccaagtataaagtgatttcaaagttttctcatagtcgtcttgtgtttttcacaaaaaccaatttctataatatacttttaaaaaattgttaatcatttctgttcaacatttcttcagtctggatcttatccaatgtcttacgctcctcgt

SEQ ID NO: 42 - DNA, 2484 bp, Homo sapiens
  source 1..2484: mol_type = other DNA
atgcgcttggagggagagggccgctcagcgagggcgggacagaatctctcccgggctgggagtgcacggcgcggtgcgcccagggacctcagcatgaacaacctcacagagcttcagcctggcctcttccaccacctgcgcttcttggaggagctgcgtctctctgggaaccatctctcacacatcccaggacaagcattctctggtctctacagcctgaaaatcctgatgctgcagaacaatcagctgggaggaatccccgcagaggcgctgtgggagctgccgagcctgcagtcgctagacctgaattataacaagctgcaggagttccctgtggccatccggaccctgggcagactgcaggaactggggttccataacaacaacatcaaggccatcccagaaaaggccttcatggggaaccctctgctacagacgatacacttttatgataacccaatccagtttgtgggaagatcggcattccagtacctgcctaaactccacacactatctctgaatggtgccatggacatccaggagtttccagatctcaaaggcaccaccagcctggagatcctgaccctgacccgcgcaggcatccggctgctcccatcggggatgtgccaacagctgcccaggctccgagtcctggaactgtctcacaatcaaattgaggagctgcccagcctgcacaggtgtcagaaattggaggaaatcggcctccaacacaaccgcatctgggaaattggagctgacaccttcagccagctgagctccctgcaagccctggatcttagctggaacgccatccggtccatccaccccgaggccttctccaccctgcactccctggtcaagctggacctgacagacaaccagctgaccacactgcccctggctggacttgggggcttgatgcatctgaagctcaaagggaaccttgctctctcccaggccttctccaaggacagtttcccaaaactgaggatcctggaggtgccttatgcctaccagtgctgtccctatgggatgtgtgccagcttcttcaaggcctctgggcagtgggaggctgaagaccttcaccttgatgatgaggagtcttcaaaaaggcccctgggcctccttgccagacaagcagagaaccactatgaccaggacctggatgagctccagctggagatggaggactcaaagccacaccccagtgtccagtgtagccctactccaggccccttcaagccctgtgagtacctctttgaaagctggggcatccgcctggccgtgtgggccatcgtgttgctctccgtgctctgcaatggactggtgctgctgaccgtgttcgctggcgggcctgtccccctgcccccggtcaagtttgtggtaggtgcgattgcaggcgccaacaccttgactggcatttcctgtggccttctagcctcagtcgatgccctgacctttggtcagttctctgagtacggagcccgctgggagacggggctaggctgccgggccactggcttcctggcagtacttgggtcggaggcatcggtgctgctgctcactctggccgcagtgcagtgcagcgtctccgtctcctgtgtccgggcctatgggaagtccccctccctgggcagcgttcgagcaggggtcctaggctgcctggcactggcagggctggccgccgcactgcccctggcctcagtgggagaatacggggcctccccactctgcctgccctacgcgccacctgagggtcagccagcagccctgggcttcaccgtggccctggtgatgatgaactccttctgtttcctggtcgtggccggtgcctacatcaaactgtactgtgacctgccgcggggcgactttgaggccgtgtgggactgcgccatggtgaggcacgtggcctggctcatcttcgcagacgggctcctctactgtcccgtggccttcctcagcttcgcctccatgctgggcctcttccctgtcacgcccgaggccgtcaagtctgtcctgctggtggtgctgcccctgcctgcctgcctcaacccactgctgtacctgctcttcaacccccacttccgggatgaccttcggcggcttcggccccgcgcaggggactcagggcccctagcctatgctgcggccggggagctggagaagagctcctgtgattctacccaggccctggtagccttctctgatgtggatctcattctggaagcttctgaagctgggcggccccctgggctggagacctatggcttcccctcagtgaccctcatctcctgtcagcagccaggggcccccaggctggagggcagccattgtgtagagccagaggggaaccactttgggaacccccaaccctccatggatggagaactgctgctgagggcagagggatctacgccagcaggtggaggcttgtcagggggtggcggctttcagccctctggcttggccttgcttcacacgtat

SEQ ID NO: 43 - DNA, 339 bp, Simian immunodeficiency virus
  source 1..339: mol_type = other DNA; strain = mac239
atgagcgaccctagagagagaatcccccccggcaacagcggcgaggagaccatcggcgaggccttcgagtggctgaacagaaccgtggaggagatcaacagagaggccgtgaaccacctgcctagagagctgatcttccaagtgtggcagagaagctgggagtactggcacgacgagcaaggcatgagccctagctacgtgaagtacagatacctgtgcctgattcagaaggccctgttcatgcactgtaaaaaaggctgcagatgtcttggtgagggccacggagcgggtggatggagacccggccccccccccccccccccacccggtctggcctaa

SEQ ID NO: 44 - DNA, 32552 bp, Homo sapiens
  source 1..32552: mol_type = genomic DNA
tgttttgatatcagaatttctggggaacatttggatttccagaatctctttcacatcagctgtaatgtgagtgtgggcatagagctgtcaagtattctttctctttagtaccaatataatgtccagtagctattaattattccaaatcaagtaaattcttgctctagtatgtgttagaacaaaggttgaattctgatcaatatgacactaatacctgtgcccttaggccttgctctaaaatgtcctccttccaatgcagaatgacacattgccccaccctattccttgacactctttcgaaggaatattggatgaaatcaaatcaattttctatctggtgactggagctctgggctgtggttgcggagatggtctggtcccctctcctcttcatatccatctgcttctgttctataagccaccttggtgagtttggaatgacacagttctcttgacgacctgccatagcaaatcagcaatatctcaggatttgggatcttaactaggaactgtatgccacacatgtgtccctgccctgtgatcacctctctgggatgacatgggtgtgtaaacagaatatccgaatagatgtgatgagtcctgcattgacataagcatggagagtgtgaaatagtctcaggaacattagacaaggctcccttgagaaggtgatttctaaaacctagacaagaagatgaagaagtatttgtccacacactccatcctaatttttatgtgccattgccaattggacggaatattatcaggtgaaataagaactggaaaaataaagggagggcaggcccacattaggagtggccaattgccttctggactgtagcgatggattgaaggtccagcaaccccaccccagggagaccctctcttcttttgggagatcagtacgtgagtcctgagggaactgttcagtcatttgccttatcctttctggcctgcttccagactctggggtccagattctggggtcctcccctaagctgcacaacctgcctccaggactggaagtttttggattttacactgctgtttacataaagtagtattgactagaatttgcacaaatacattttatattgaaaaatgatatagagtacttattatgagctggaatccagtactactatgtgctgggtaaccaggagatccgaggtaacaatgttttccctccatgattccaagtctggctggaaagacattaggggaatctgaagtaatgtagccactatggtaagagtggggtcatggtgagggaggcacaaatgaagcagagatcatttctttggggtgaagggatggtggttcaccctctgaatgtctaagagacactgacattaaagctcagccttgaaatgtaatgttaatgagacagaagaagtattaaaagacatttctggtagaggcagtagtttaaaagattggtattgagacatgaaatactgagatatattgatggggggtatgttgcgcattcggggaataacagcagcaaggtgaataggagggattcagagagtgctgcacagagaggaagtcaggcacccacacttttgggaccctggcatgacggttctaagcagtgaccagcagtcccggtggaggagagaggaggacaacaggggaagatggttctgggctggagatctgcagggaaggtatggcccaaggaaagtgggcaacagagctaagagaggaaagagagcaattctggggtggatgatggagggcaggctgcatagagaaggcagcagggggctgggaggagaaaatgaaagcccagggactgtaggtctccgtgagttccaagaacaggtggaatgagaatgagaaagggagagaaggaaagagaagaaaactaatggtcagacatggggatttagaggtgaaaatggcagatcagtcctgaaggctgacgaggtgcagaatatgttcaggaaggaatgttcctgataaggagaggagatgctggtctgtgaatagaggtgtgagtgtggagtggagcagtcattccaaagaacaaatagcccatcttacacactgctgctggtaggatggaaagagaatttttgagatgtttgcctgattcctccaagaagaatgtttgcctgattgagaggttagctggagactgaccagagtagtaagagtgatagggacacatgatgtgagcctcaaggaagaatactaagagcggctgcacagaacattgcctggaagtgacaccaggtgaacactgaccctgtgttgtggcctgcatggagagacccgccagtgcactgctaggacagcactgtgtcctgcctgtttctgcatcctcagcccataacacactgcctggcctggagtagactaccaataacaaactactccattacctgcgagatagaggtgctgcaatttctcatcacagtcagcatgagctctctgtgtcagtccttacagaatttccgtgatgctgccttattccagccagactgcttacttggactcctggaccacttagagctcctcaaaatctggaatattcattcatcaccagaaacccagtcctggcattgagcaaaccatcatttaggacagctaagcatcacagtgactccttctcacttccacagggtcacccacataggcacatgcacacaagcacacagcacagggaaaggacactgcccctggagcagaggccacaggacaaggaagcccatcctcagggcactgctgagcctcccattcatagccccaagggcgctgaacctgaagccatccaggaatccctatgtgagtggtttctgtttccccaagccctggagaacagctggggcaggagtgggagggcaggagcacactgagagatgccagctccttctcagtgcagtatctgaatgtgtctgaatgaccctggtccatgccttgacaaggagagcattgctgtgacctggcaggggccttctaccaacttccacctggaacctgccaaggtggctgcatttagggaacggtgcagaggcagacaccaggacctgtgtgagaggcagatcagctctgctggaggccatagggggaacgttgctggagggacattactcctgggtgacccactggatgggggtgggggaaattctccaacaaagttaacctggaattggtagttttgacaatgtaggtcaccaaagagaagaagaaataaggcaagtgtctggtgggaggagacacttattgttcctggggtctctggaggccccttggtggggctggatcactggcttcccccagaacagggcgccgctccatggctctgcttgtggtagtctgcggctatgtctcccagcaaggacagaaactcagaaaaatcaatcttcttatcctcattcttgtcctttttctcaaagacagtggcgaggtaatgtatgccctttttgtcctgtgaagagaaaaacatacaaaatagaaaaattcaatcacaaacaagttttgggctgggaggggagaggaggaggcagagatacagacaagtacctagatctgcacaggcatggtcgtggggctgagagcacagggtgagtgggtgaagttggggtgaggacgtgagtgttatccctggagttctctaaggagactttttgtctcacacctcaggatgggaggcaggtcctgtcccgaggcactctgttaagtgaccttggggagagcagtcccctgccccagcctcaatcttgcctgttcccagcatttaagggcactgcctaccttagttctaccccagggcctcaaaattggccctcatgctttgttctcttctttctctgacctcctctcctttcttctccttttccaccaaactcatcttctgggttccctactcttggtcatctagaccctttggtacctagtagcccacaggttttttcagatttgccaatgagttttctttattgcaaagagggctattgatttctactagcaatggaacttctagtgctttcccagtaatctcagggatgttgatgtggggcctttgggaagcaggacctgagcatgtgagtttcagtctcacagagagagggtcagtgagcgctgggaggggactgtgcactgtcctcaagctgcacactttgctgaccatctaataacctcctttatatctgtataactctttcccattttcatactttttcgcctaccatccttagattcacatatgatccaagcaataaagccctatttgcaaatgggaaactttttaatcagaggatgagggtgacctgtccaaggccacatagcaaaatgtatcctcagccatgccagggtccaaccaacattgagaagctagaccccaactcacacaggcactgaggaaattggggaagttctccttcatcatcgtcagcaggcttggcttctcaatcttgccatcacgtccggtgtatttgtgaaacatgtcgatcatgcctattatggacctctcagcttgagtgttgctcatctttgctttcaaaaagccttcaggaaataaagacaatcatttcttaccttagtttgaattaaggtctctatgtgggggtgttagaaggagggctgaggacagagtaaaaacagccctaagatggagcagaaggaacttgatttttttaaatgtgatgggataagttgttcaaaaatgagagggtaggaccaagtctgagacccggcccatcctggccagggccaagaagagatgcaggtggatggcagaagtccagctgtggacagtgcttcagagaaggagaagcagggagagtcggaggccagcaacacatagaagaactaagctgggaccccccagcctcaaccagcacatggcggaccccactcttgaaacagcaccaaatccatctcctccagcttcacagtcggggtgagagtcacgggggcaggacaatggccttggtgatctggtgtctgaccctcctcggctgcttcaggaaccagacaccgtgggccccaccttgactcaagtgcaagccctgcatgacacagtgcgtgcaggctccaggtgcacatgtgagcgtggacatgagtgtgagcaggaaacacagccctctcccgaggacagggggcccttcctacattcccttgggaatgagaaacaagaattgcctctgttacaaggaacagaaataactccctggttcttaagctgctggatggggtgggagtgaggtgggagtcgcttcatgtctgctcttgggaaatatctgcaccctctgaatcaccaagggttgaccctgtttaaataaaaatgtctgactttccaaagcagatcttccagccagtagccagcctgggctgccctgcaccccaagcctgaaaaataagacagtgcagctctcatttctacactttccaaagaaccagaaaaggaccttggctaacgcatgtgggcatctgacaataaacccccaacacctctcaacgcaggagaaagctccgtgccagcaactgactaagagaagccactcaaagctttctgaatctgaggccaaggccaaggccagaggccaagccctgtgcccagagattgactgagaatttacaggtccaaggcctgggggtttggagagcctccaaagcattcacaggggatccttatccctcctccctctgtgggggcagagctggggaggggattcagcaactgggatcccaaaaggagaatgaatccagggaggaagaagacaggaaggaaagggagggtcctgtgctcaggtcccactggggacatttccacaggagttgtctcaggagatcccaaaggagcaatggacaggtctggttcagccacctggttgtacagacgtgggcttttggggtcaagtgaaggtcacacagcccagctaatggcagagctggcctagacccaggcttctgagactttgtccacagccctttcccttcctacaggcagcatggcaggctgggcactgggcacttctagaaaatgcaaagaggcaggtgagacttaccagaactgggaagtgtcacgagtagaaggatgagtgagatgtgtgtgtttggacaaagagcagtcctttataaggctcagcctggctcttcccacgggttgggaggcctggggccacctctgtcatctgtttcttggaggcttgtcccatatcaggtgtgtgggacacacccaggaggctgtgctcaggatttctggccagggtcccaggtcaccaggtcccaccccaccccagagacctcacctggggccttctctggctcaatcttgatttgagggtaaggcagcggtacatgtgtagtaacaggtcaggaaatgggagaaaagagcactgggcctctggacccaaagagaatggagtttcagactcccaaaggcagcatggtcttgtttattccctcccccagtacttccacacatttgttgtgacagcctgttctatgacccccaccgcttactgagcgttttaatgtctagacatcaagacacctgctgctcttgcatcctcctcaaccctcccctcatagtcttaagaagcaggtgctgcaatctctattttaggaaaggagaagttgagatgttcccaagtttactcagctagtaaacacaacaaatcatcacacgaacaaagaaaagcctgaatcaaatccttactcttatcccctgtgctataggtcttgggttgcatcagggtctgccctatgggaactcaaagtccagggagggaagcaggattacttcattgctaaccattggtcagcccctcacagaagccctggatttaggtggggggactggggtcaggggcctcactatctaggttgagtggtggagtgacccccgccccccccgccccatggaatgagcctggaggtagggagtgggaaaagttctttcctgccccatggcactaacttcccagaaagtcttcagtgtttttcctcctcctatgcaaaacagcctgtgtaggagttgggagttgtgcccttggctataatgtgccctaacctgctgtggaaagcctgaaccaggtaggggcaagagggttgggaaggcacaggagtccctggggcatggtgaggaaaaggagatgatgaatcactgaaatggactttttctgctacccccttacaatgttccttgtaggccgcaagaggtcctggttcatttagtgccagccctttaagcactctggggctccatagagctgatgtgatgtctccctaggtgggacctattttctccacccatcatctttcttcaacttccttctctgtcagttcttatgtaaccagggggacctgtttctccctctcccagtttcccatatgacggcaatattacttttagcggcaaaagatacacacacacacacacacgcacacacacacaaacacacacacaaacgcacacatacacacacacacagacgaatactactcaaccataaaaagaatgaaatgatgacttttgcagcaacatggatggaactggaggctattatcttaagtgaaattactcagaaaaagaaagtcaaacactgtgcaccctcatgtgtaagtgggaggtacatcatgcatacagatggaggtagagagagagtagaatcatagacactggagacagtgaagagcaggaggtcaggtggtgggtgaaggaggagacatttcttagtgggtacaatgcgtgttatttaggatggctgcattaaaagcccggacttcaccactgtgcaatgtgttcatatacatgtgtatgcaggtttttgtgtggacataagctttcagttcttttgggtaaatcccgaagagtgtgatttctggatcctatggtaagagtatgtttagttttttaagaaagcaccaaactgtcttcccaagtggctgtactattttgtgttcctgccatcaatgaatgagagttcctgttgctccacatccttctttagcatttggtgctgtcagtgttccagattttgggcattctcataagtgtgtactggtatctcattgttgttttaatttgcatttccttgaggacatatgatgtggagcatcagctgatatgcttatttgtcaccttctgtatcttctttgatgagatgtctgttaaggtctttggcccattttctaattgtttggtttgtgttcttatctctgagttttaagagttctttgtacgttttggataacatacaaagtctgatatgtcttttgtaaatattttctcccagtctgtggcttatcttttcattctcttgacaatatctttcacaaagcagaaatgttaaattttaaagaagtccagcttatgaattatttctttcatggattgtgccttggtgttgcatctaaaaagtcatcaccaaaaccaagatgatcaaatttcctcttatgctaccatctaggagttttgtaatattatgttttgcatgtaggtctatgattcattttgagttacatatcatcactgtttataaaaaaaaggaacagaagaaatgcaatacaaaaggaatcagggacaacaatattaatacaagacaacaaagaattctaagaaaagggattaaatgaaaaagaagaatatttcctattgattagtgtgcaagtcaccaagatgcaatagtcttatcttttttttctttcttgttttttcttttttatgagacacacttttgctcttgcagcccaggttagagtgcagtggtgtcatcttggctcgctgcaatctcctcctcctaggttcaagcgattctcctgcctcggccttctgagtagctgggattataggcgcctgccactatatccagctaatttttgtatttttaatagaaatggggtttcatcatgttggccgggctggtctcgaactcctgacctcaagcgatccactcatctcggcctcccaaagtgctgggattacagttgtgagccactgcacctggcaatagtcttatccttatatacacaagaacataatattgaattatacaaagcaaacattgaaataaattaatgaaaactgacaaatttatatcacttggcagtttctggcagagtctgcccaggaactcaacagagtcgtcagataacaaaacaccagtaatggtgcagagcagggcgggcagatgctgccacagcccagaagcagccctggacataagggccccgtggatgaagacagctgtttctagtaaacactaatctccagaattggttggccagctggatttggctttaagaccataatttgctgattcctgatacaaaatatttgaaggacacacttaaatttatttatatacacgtgcattcataaatttgtgcctgaccatagagaatacatataaatttctttttttgtattgaggttctttattaaattaattatataatctgtattagataattaacgtttttacaaaaattattattatactttcagttctagggtacatgtgcacagcgtgcagtcttgttacatatgtatacatgtgccatgttggtgtgctgcacccattaactcgtcatttacattaggtatatctcctaatgctatctctccccgctgccccaacctcacgacaggccctgatgtgtgatgttccccttcttgtgtccaggtgttctcattgttcaattcccacctatgagtgagaacatgtgatgtttggttttctatccttgcgatagtctgctgagaatgatggtttccagcttcatccgtgtccctacaaaggacatgaactcatccttttttatggctgcatagtattccatggtgtatatgtgccacattttcttaatccagtctatcattgatggacatttgggttggttccaagtctttgctattgtgaatagtgctgcaataaacatacgtgtgcatgtgtctttatagcagcatgatttataatcccttgggtatatacccagtaatatgatggctgggtcatataatggtatttctagttctagatccttgaggaatcgccacactgtcttccacaatggttgaactagtttacagtcccaccaacagtgtaaaactgttcctatttctccacatcctccccagcatctgttgtttcctgactttttaatgatcgccattctaactggtgtgagatggtatctcattgtagttttgatttgcatttctctgatggccagtgatgagcattttttcatgtgtcttttggctgcataaatgtcatcttttgagaagtgtctgttcatatcctttgcccactttttgatggggttgtttgtttttttcttgtaaatttgtttgagttcattgtagattctggatattagcccttcgtcagatgagtaggttgcaaaaattttctcccattctgtaggttgcctgttcactctgatggtagtttcttttgctatgcagaagctctttagtttaattagatcccatttgtcaattttggcttttgttgccattgcttttggtgttttagacatgaagtctttgcccatgcctatgtcctgaatggtattgcctaggtttccttctagggtttctatggttttaggtctaacatttaagtctttaatccatcttgatttaatttttgtgtaaggtgtaaggaagggatccagtttcagctttctacatatgggttagccagttttcccagcaccatttattaaatagggaatcctttccccatttcttgtttttgtcaggtttgtcaaagatcagatggttgtagttgtgtggtattatttctgagggctctgttctgttacattgctctatacctctgttttggtaccagtaccatgctgttttgattactgtagccttgtagtatagtttgaagtcaggtagtgtgatgcctcccactttgttcttttggcttaggattgtcttggcaatgagggctcttttttggttccatatgaattttaaagtagttttttcccaattctgtgaagaaagtcattggtagcttgatggggatggcattgaatctacaaattaccttgggcagtatggccattttcacaatattgattcttcctatccatgagcatggaatgttcttccatttgtttgtgtcctctcttatttcgttgagcagtggtttgtagttctccttgaagaggttgttcgcatcccttgtaagttggattcctaggtattttattctctttgaagcaattgtgaatgggagttcactcatgatttggctctgtgtttgtctgttattgttgtataagaatgcttgtgatttttgtacattgattttgtatcctgagactttgctgaagttgcttatcagcttaaggagattttgggctgaggcgatgggattttctagatatacaatcatgtcatctgcaaacagggacaatttgacttcctcttttcctaattgaataccctttatttctttctcctgcctgattgccctggccagaacttccaacactatgttgaataggagtagtgagagagggcatccctgtcttgcaccagttttcaaagggaatgcttccagtttttgcccatttagtatgatactggctgtgggtttgtcataaatagctcttattattttgagatgtgtcccatcaataccgaatttattgagagtttttagcatgaagggctgttgaattttgtcaaaggccttttctgcatctattgagataatcatgtggattttatctttggttctgtttatatgacggattacatttaatgatttgcgtatgttgaatccttgcatcccagggattaagcccacttgatcacggtggataagctttttgatgtgctgctggatttggtttgccagtattttattgaggattttcccactgatattcatcagggatattggtctaatattctctttttttttgttgtgtctctgccaggctttggtatcaggatgatgctggcctcataaaatgagttagggaggattccctctttttctattgattggaatagtttcagaaggaatggtaccatttcctctttgtagctctggtagaattcggttgtgaattcatctggtcttggactttttttggttggtaggctattaattattgcctcaatttcagaacctgttattggtctattcaggaattcaactttttctgggtttagtcttgggagggtgtatgtgtccaggaatttatgcatttcttctagattttctagcttatttgcatagaagtgtttacagtattctctaatggtagtttgtctttctgtgggatcggtggtgatatcccctttgtcattttttattgcgtctatttgattcttctctcttttcttctttattagtcttgctagtggtctatcaattttgttaatcttttcaaaaaaccagctcctggattcattgattttttgaagggttttttgtgtctctatctccttcagttctgctctgatcttagttatttcttgccttctgctagcttttgaatgtgtttgctcttgcttctctagttcttttaattgtgatgttagggtgtcaattttagatctttcctgctttcacctgtgggcatttagtgctataaatttccctctacagactgctttgaatgtgtcccagagattctggtatgttgtgtctttgttcatattggtttcaaagagcatctttatttctgccttcatttcattatgtacccagtagtcattcaggaggaggttgttcagtttccatgtagttgagtggttttgagtgagattcttaatcctgagttctagtttgattgcactgtggtctgagagacagtttgttataacttctgttcttttacatttgctgaggagtgctttacttgcaactatgtggtaatttttggaataaatgtgatggaataaatgtgacgtggtgctgagaagaatgcatattctgttgatgtggggtggagagttctgtagatgtctattaggtctgcttggtgcagagctggatatccttgttaactttctgtcttattgatctgtctaatgttgacagtggggtattaaagtctcccattattattgtgtgggagtctaagtctctttgtaggtctctatggacttgctttatgaatctgggtgttcctgtattgggtgcatatatatttaggatagttagctcttcttgttgaattgacccctttaccactatgtaatggccttctttgtcgcgtctgttctttgttggtttaaagtctgttttatcagagactaggattgcaagcactgcttttttttgctttccttttgcttggtaggtcttccttcatccctttattttgagcctatgtgtatctctccacctgagataggtctcctgaatacagcacactgatgggtcttgactctttatccaatttgccagtctgtgtcttttaattggagcatttagcccatttacatttaaggttaatattgttatgtgtgaatttgatcctgtcattatgatgttagctggttattttgctcgttagttgatgcagtttcttcctagcatcaatggtctttacagtttggcatgtttttgtagtggctggtaacggttgttcctttccatgtttagtgcttccttcaggagctcttgtaaggcaggcctggtggtgacaaaatctctcagcatttgcttgtctgtaaaggattttatttctcctccacttatgaagcttaatttggctggatatgaaattctgggttgaaaattcttttctttaagaatgttgaatattggccccgactctcttctggcttgtagagtttctgccaagagatcctctgttagtgtgatgggcttccctttgtgggtaccctgagctttctctctggctgcccttaagattttttccttcatttcaactttggtgaatctgacaattatgtgtcttgtagttgctcttttcgaggagtatctttgtggccctctctgtatttcctgaatttgaatgttagcctgccttgctagattggggaagttctcctggataatatcctgcagactgttttccagcttggttccattctcctcctcactttcatgtacaccaagcagacttagatttggtcttttcacatagtcccatatttcttggaggctttgtccatttctttttactcttttttctctaaacttctcttctcacttcatttcattcatttgatctgcaatcactgctaccctttcttcctgttgatcaaattggctactgaagcttgtgcatgagtcatgtagttctcgtgccatggttttcagctccatcaggtcatttaaggtcttctctatgctgtctattctagttagccattcatttaatctttttttcaaagtttttagcttctttgcgatgggtttgaacaaactcctttagctcggagaagtttgttattactgatcatctgaagccttcttctctcaactcgtcaaagtcattctccatccaactttgttccgttgctggtgaggagctgcgttcctttggaggagaagaggtgctctgatttttagagttttcagcttttctgctctggcttctccccatctttgtggttttatctacctttggtcttttatgatggtgacgtacagatggagttttggcgtggatgtcctttctgtttgttagttttccttctaacagtcaggaccctcagctgcaggtctgttggaatttgctggaggtccactccagaccctgtttgcctgggtgtcaccagcggaggctgcagaacagcaaatattgcagaatggcaaatgttggttcctgattgttcctctggaagctttgtctcagaggggcacctggctgtatgaggtgtcagttggcccctgctgggaggtacctcccagttaggctgcttgggggtcaaggacccacttgaggaggcagtctgtcagttctcagatctcaaactccgtgcttggagaaccactactctcttcaaagctgtcaaacagggacgcttaagcctgcagaagtttctgctgccttttgttcagctatgccctgcccacagaggtggagtctaccgaggcaggcagacctcctttagctgtggtgggctccacccagttcgcgcttcctggctgctttgtttacctactcaagcctcagaaatggcgggcaccctgcccccagcctcactgccgccgtgcagtttgatatcacactgctgtgctagcagtgagcgaggctctgtgagtgtgggactgtccgagccaggcacgggatatgatctcctggtgtgctgtttgctaagaccactgaaaaagcacagtattagggtgggagtgacctgattttccaggtgccgtctgtcacggcttcccttggctatgaaaagtattccctggccccttgtgcttcctgggtgaggtgatgctcaccctgcttcagctcatgctctgtgggctgcatccactgtattgctcccactgtctgacaagccccagtgagatgaacccggtacctcagttggaaatgcagaaatcacctgtcttctgcttcgctgggagctgtagactggagctgttcctattcggccatcttggaacctctccaaaaatatcaaacatatttgagacatccaaaaaactgatcatttgtttttgctaaaatcaaaatcttagcaaattagctttaataggggccttatcttttgcacctgctcatcaggttgaaccctgtgagcctttcccctgtgtcatgtctggaacaaacactctccataaacccaccccatcctatcacacatccaacctcccagccactgctgatcccccaggagagctcacaacaggctgattgtgaacaggaatttggctggttgatatcttcatctcctctatcgttttggggagctcgcctctccccagcctgaagtagaagcaacatactcctgggtctctagaagatctcaagttgctgggggaagaggacagaaagcaatttgttctttttgctgtattttatccattcatttatgctgtgagtgctgactctgttctgggtgtgcaggtgtcagggtggcagggagatggagtggatgtggaccatgctttgagcaatgctctggccccaggagagaactccaatataaggcactgggtggtgagagagtagagtgggacagagcccggaagcccccaggtccccaggcagttcagtggtcactttctctgtgaagccttctccaggcagagccatcatccccatgtccctgcatgtctcagtgacagccctggccacacatatgctatgtttgctgccgcccagccatgtcttatattgtgcccccagcctccagtgcagagaactccataaacattggccaaactagcaagtgaggcaggtgtcttcaaaaaggttcagataaagtgtgtgggaatttggaagaggagaaatcacttttcaggtgggggaaccaggggaagctttgtaggggcatcctttcaataggccatagagcacttccaggagccacggtgagagggacagggcagagggagccacgggaatgttccaagacagccagctgttctgtttggggtccttctgggtggtgctggccagctgcatctctggactcgtgcagcagttgggggagcgggacagagagacagagagagagttctgcagcattcacaagaggttattaggactcagttctgctgtgagccatccacactggaggatgagaacacccagctgcagcccagagcctgtggtcccactgttaggttttgaagggaaggcaagggttaaaaaaagacacagagagagttggtggctctatggaaatgcaggttttatgtccagcacaagacctgaggaggtgggggacaagcttaatgccagagccccctgccgcttacaggctggggtaatttataggtctaggtgggggtctgggcagtatggctagctcgccgggaggatattgataagatgttcctgtgatcaggcggtttggacctttttccagcgggatgtgataggctgtttcttggacctttgccccgcaggatatgatggggatgttccttcagttgcgcctttgcccagcagggtatgataaggatgctcttgtgccttgcggtcaggtggttaggcaggatgtttctcacggcctgaatccacatggaatgtttcactctgaccagggtccgcaaaatggcagggggcttacaaaatggtgcagtttggactaacacccaccatcctgtcgaatgggtttgctgggaggatttactgtcaattctgttagcctgataagggaggttgctttctcggaggccgcatacacagacagtgctaggaagtgacccaagcgtaccctgagaaatgtatctgttcaaccaaatttcaagttggcaatgatcattcctcatctcgcccaattttaagacgaggctgggccgtgtaggtaaaactggcaagctggagaaagcagtgcggggtgggggggactccaggaaggctccttggccaaggaggactgtaggattctgacttacactgtaagggctgttcctgttacagttggccccagtcagaggcccaggacaaaactctggccctgagtgcagagaattggttttctgtttcccaagcttccacacggtggcgccaccgagcacccacctcgccctggttgtcgccggaggcagtaccacgtggctgggtccttcgtggttcccgcccttctgtaggttgtgagtcccacgtcgggcaccaatcttgcacctgttaaaaaaagagatcttcaccaaaagcttctgaaaggcagagggcttttcttacttaatttgtattcttttctctctccaatgcttaccagaggacactgcataaaatagtatattggggacacaattgttaatcaagtggtagaaacaggaagagataaaaataattaaatttttagtaatggtgggttaagtaaatcttgatgcctatacacatggaatccctgtgatgatacgaaatggacatttggtctttgtccctgttcctgacaccgagcgtctgaaatccttggaatctcctgaatgacaggggagagggagcatcttttgttattcataacaatccccttccagtcatgctgagtgtgtgctaatgaggtgactcttggtggacccctagatagcttcaggatggggctggttgccagaggaagcaaccatgtgattagagggctggagctttcagccccacactgggcctccacagagcggctggggaaggacttcaatcaccagtggccaattatttaatcaactatgcctaaatgaagtgactgccatagaaaccccaaacgatggggttcagagaactgtagggctgctgagcaggtggggtgccggaagggtgggctcctggagtgggcctgggagctccatgctgcccctcatacatggccctgtgtgtctcttccacgtggcttttcctgagttgtactctttgtaataaaccagtaatcatgagtaaagtgcctccctgagtcctgtgaactcttgtagcagattatctaacctgaggagggggtttgtaggaacctccaattttagccagtcagtcagaagtatgggcggtcaggtgctgcgattggcatctgcagtgggggcagtgttgtggggctgagccttcaccttgtggggtctgtgctaactcttggtagttaggatcagaacggaattgcacgataccccgatggtgttcagagtgttggagaattggttggtgtggggattttaaaaaaaggaaatataacccccacacatttggcgtcaaaagtgttgttagtcagaatggttctggaattccatataatgtagctatttggaatcaatcactcaaaaatatttaagaactggggagatgttttaaacatagtcctaattgaaaaagcagatcataaaacagctgggaaagggcagggccgtggcccacagggtggacgtggagtgggggtggggagggggttaatgtgacatgattgctccacatgagacaaggccacggaactcaggaaacaaagcttgttttgagcaagagtcgtgtcagatttcgacaggaggtagagcagagagaagatatctttacataggtgaagctaacagttcatgataaagtgttctcagccttcacattcacagtcaattgattttcaacaagcccgccaagccaattcaatggagaaagaatagtctttccaacacatgatgctgggacaagtggacagccacatgcaaaataatgaagctggaccccttccttccttcatacacacaaattaactcagaataggtcacagccctacacataagagctaaaactaaaactcttagaagaaaatatagaagtaaatcttcaagactgaggtcttgaatatctttgcatatgctactgaggctttatgactttactttccacagttagacctacaatccacttggaattgtcattttgtctgcttgtgtggtctagtttcatgagcatgagcatccagttgatccagtaaaatgtattgaaaagcttgtgctcagcagtgccacttttgtcacagaataaatataccatacgtgtgtgtctttttctcagacctctatttagttctgttgatctatgtgactgtccttgaaccagccaggcagtatcttagttaccggagctgttatgataaatcttaacatctagtactgtagatcctcccatgtcttttctttttcatgattcccttggctattcttggcctgtctatatactttttacagttaacttgtcaatttctacaaaaattccagcaaggactttgggactgggattgcactgaatctataggttacgtttgggagaactatcagctttacaatagcatgtaaagctgctatgaacatggcatatcccttactaaaaacttttagtggcttcccatcctgcttaaagtccaaattttgcaaagtcctcgttggcttgtcctctgcctgcccctcagacctcatctcctgtctttctgggctccatttacaccactccagcccttctttctgcccctctgtcagcccaggctggctcctacctgagcacctctgttccagctctttcctctaaccatggggcccttctcctgctctccctaaggttggatttcctgttattcggggacaaggtaatgtagtggttgagaacaggtatgtggggcccatgggcctgggttagaaatgtgcctctgcattactagctgtgtccccagcatgctcctgtaattgtcattccttgggctttttcagcaattgttaagaagatgagatgaatgggtggatgtaaagcccatggagcagtgctcagcaaagaggaagaacttaatactgttaatcatcttctcactctccagcagcctcctggtcctacagaagcagcctagggactccctatgctcaaatcctattctttttctctacacggcaataatgtaccctttctttctctttatcacattttctgtgaggattctaatgcatctagcagctcccccttcaagcacagcccatctaacacacatttcagatactcttgaggctgttgactgggatatcaggttgctctaatcctaaagataaaaaaggtctggaaaaaagaaaatagatatacactggtaagaactggcaaaaatccctaaatattccatcagtataacccgattcatcgtctcaagtaccatatgagatttctttaatttttaaggtaattacttgatcctcttcaccaccacctcaccgccctcttagtcagaaattgaatattatcctgcttgaagtatttccaattcttgaggtgtctaaaaccctgggtgcggccgaagcggggatgggggtgcttcagggccagtttcgggtaacctcctttctcaatttcaccagaaagcgctactcctttgctgtactggcttctggatgtcacgggacattgttttcagtgtctggtctgcacactggaaagacatgaagactgtgtttgtcaagatcacaatcttagtcctggccatgggtggttgggttgtgacatgggagatgcatgcttggcaccatgtttatggttcttttctaagtacagtaacctgaagttttggccaaatgtctgtctccacctacagactatgagtttctggaaggcagaatgttattcaattcatttccgccccctttctccacagcacctagcacaggtgcacctagcacctaacacgtggcaaaattctgataaacattaaggaagagttgacattaaaatgtataaataaaagtaatttaatgtctaacaataatggattcataagacaaattttgataaatgcaaacagatgatcgctatgtactcgccaaaaatcaggctagcattgattaagcatgtgagatgtccacagcataacattaagcaaaaagtgcagttacagcgcagctgtgcaagggatcatcactgggtattggcatggcgtagggggctgttttgtcccagagtgaacaaaaggtagggtgaaaaggagtgcagtctgccccccatccccagccataggtcagaaatgaagtttcttctaaacaacaagctgttatccagcaattgtccaacagtaagccatatgggtataccaaatttgttaattagatagttttaaggttttgcttttatttttgtttcttggttatggatattgcaatggtggacattttcctgatgatttttaaaatatctgtttaattaattgttttgggagaaattgccagggtaatgatggctgaaccaaagaattcgatacaattttttgtagctctagcttggcaatgctgagaaattcaagccatgtttttagtttagaaacaggaaagtgtattgatgaaccacttgtttgctggggaaatctttatgttgagtagatgaaggctcacccagcaaactggaaaagctgttggcttcggtatctacctatgattttctctccagccttcagagatgcatagatggagtctctggtttgatgacctgccctttggcgccccattctggaagattcagtcatcagcctgtgcaggccctcccaagggagctgtgtggggtgaaatggggccaagtagaaggggccggctgggagaagtcttgtgttggggtgagttggcagaggggaccccacctgtcactcactcaggggcccaggtagcatctgtagggatgtcgagcctgaaggtctggcccctctcagagtagggtgacttccacattgcagtcggtgatttactagtaaacaaatctggttctaccacttctctttcacctcccgtccatcacccaactgatttaaaaaatcctctattagcttcctctcttgtttgtgtatcacagtcttgccctggccatgggtagtgggggttgtgaggtgggagatgcgtgtttggcaccaagtctgtggtgcttttctaagtacagtaccttggagttttggctagatgtctgcctccactgacagactatgagctggataggataaagtcacagttgtagcttggcacagggtcttccggtcttgtctccctcctgcctctccagccttgtttcttctaacttctcattgtgcaccctgtggactccatcccctgagggggccgcgctcttttacagccccgggcctttgcctgtgccatatcctctgtctagagtgcctggttctcctttcctccttgcaactcaaaatgtctcttcaagtcgcagctgaaatatcgcctccctaaggaagtcccccccaactccccaggtggaaggtgtccctttctgggtgcctggagcacctgtctgtgtcactcagttggcttccatgtgcctagtgacagtgtgtgactgtcccctcacatgtccccaccctgtgagctggccctgtatctgatgcatattgcctagcagaaggcctggcacactgtaggtactcaagaatattcgttgaatgaatgaaggaatgaatgtgcttcatgacagtggagtttgggggttcactaatggagggaggacaccccagggagatgtagttaagtgtgtgtctgaccccacccaagccctggagctgagaggacaagctctgaggcagggagacagataatgggaccttttgtgattcttagatgcttcagatcctgctccaagggatgtgggcccctgaaactggttgagttaatcttagcaagttaagtgttgtgatgtcacctcaggaatgcaattaaggctcagtcctgctcctgaaggacctgtgaagcatcacaacactggctgccataattggaggcattgaggatgggtgggatgtggggcttggtggtgggttcgcggctcacacaggtgcctcctgcctgagcgttggggaatctctgggatcaactacaggctggatctgtggatttggatactcaccccaacagtgacaggtcagtgcctcttccaagagaattgtgggggtgagggtttgtgttggatctgtgcaggttctaaaaagcagaggtggggacagtttacctgtttggagaacacgtacagtgtggatgggcatcccaacagcacaatcgtggcccaaggcgggtgtaggactggaactgaaagcatgcctttgggcttgttcccaaagacatgggtttgaacgaagctccaagtggatcattgtgtgatcttggggaaattacttatcctctctgggtttcatttcccccttaggaaactgggggtaaatatgcttgctttctatggcccacgtgagggttacgtgggatacgggataatttgtataaagtgcttacctggtgcctggctggctccatgagcggtggaagcagcagttgtcctgattcctatctgtagagtccagggagcactgctgatctgacagggtgatcttgtctcatctccagaggaagtggggagtgggaggtcacaggcatcagagcaccagagaggagctgcacagaggctctgggagggccatgggaatgtgagggctgaagggatggtgctgatggcatggggactccctctggagagggtggcacagtgtggtggcagcaggaagagaggtgggatccatgcccgggggaaggatagcagggactgcggtggcccccctaaccagggtgggagtagggtggggtggggttaggaaacattacttccccttccacctcttatccccagagtctctcagacctggacaggcccagcacccaaatccgggcttagacagccctcaggccctgcccatcttctttgtcatcaaacgtagacccatgattactgggctccttggggcctgcaagggtgtctgtggggtgctgctgtctatccatgccctggggtgtctggactgtcatctccagaggacttctggtccatcctgactcaaggccactccatccaggaaaaggctcttcttcagtcacttcccatctccccagccttgcctctgcttactggagtgttactctgagggttgtagagagggacggagtgagggggaagtgattgttggtggtcctgtttccaggaaaccttgtcctttccagggcaaactgtaccaggatggcccggaccctgcactcatgggggtcacagccccgcctgggtacggggcccttgcggggatagaacctggacacagaaggcggccctggggaaggtgggccgaggtgagggaagctgggagagcctgtcccgggcaggaagcctccagctcctctctgggtaaccagctttgtggaacagttaagatcacaggaacaggtggtgggggtgggccctgaggggagagagaggctgcaaacctgtccacagctgcttcccccagatggtttctagggcttcacactggtcctcatgcccaccagccaaatcttgctgaaagctgcctcacccgccctgcccagtgctcccgatgcccaccttgtctcttcccactctgtccccgtgctgtgctctggcccctgactttcttcatgctgttccttccacctcaaatgcctctttcctctcccctaccatccccatttctcagccctcagggtcacatctgggccgcctgcctcggaacaacctggacagctccagggctcctggctttgtcctttcccttgttctgcgctctatgtgggcccagcacccaggggttcagaggttcgcatgctgaccatctgcctgggaattgctcctgatgcaggcaaatgcacaggcatgcaaacctctgaccccctgggcaccagccttgcagcagcgctggggatgcagactcgagggccaggtcgactctgctcttggggagctcccagtgtggaggaggaaggcactgccctgccttgaggaagccctggctggggtgtttctccagaggagcctccagttcagctgtgaagagaagtataaacagctactgccagtggatgcgaagtcgtctgggatgctagtgcttctcgggcactgcagacagtaaaccatcaatggtgcccagtttacctcctttgtctgcacacatgcagctagctccaggctcggttatgggggcaccaactaggggcaccaactatgcccctgtctctttgcagcattcagagtcctagtcactgacgattggagtgaggagtcatttccttgcaggcaaggccaggccacagttaccccatcccctcccagtgggcagtggggagcctggcaggtgggctgtatgcctgggtgggttgttgatgctctgcccacttctcagggccggaaggagccatactatatcacagagttgttccaggccgcagacaagaacaaggacaaccagatctgcttcgatgagttcctctacatcttgggcaagctggtgaaggactaccacctgcactaccaccagcagctgtgtgcccgctactgtgcccaacacagcctctactagagggagctcaggcagcctcctgcccaccggtgccggacccaggaggaggtgtgaccttgatatcaggagctgaatggagaacacagctgtgtgtgtctgtgtgtgtccctgtgtgtgtgtgcacatgtgtgtacatgtctgtggaaaggacatcaatgtgagagagaataaagcaatttcatacatatttccaaggatttgtcagtatatggttctgggcttcacctacaatccagaaaaagaagtttcggtcccaagctgggaaagatccattttagatcaacgaaatagcccttgcctccagggagcccctgtctgaggggaagaaacagcttctatctccagggagcccctttttgagggggagacacagctcctatctccagggagtccctgtctgaggaggagacacagcttattcctctagggagtttatattggatgggagagacaccacctctgattccagggggccctatctgatagggagacagtccccacccgcagtgttcagcctgagaaggaagagtctcctctcttggggagatagcgaggcctcgcttgtggtcactcactcacccaccacacaggtggtagcacaggggtgagggtaggggtgaactaacatgccgctccgacagcatccctgctctgaaagagagccccaagaatcagtgaacaagggtggggctgagcctgggaagagaccaggatcgggaggcaggtgcatttctagcagagggaacaacagtagaaaatcataaagtatgtctaggagcaacagaaattttgcttggaaattagtgttcatggagaaaacagtaggaagtcagcttgaatgggtgggttaggaccagagtctggaagtccctgaaaactgagcattggaatttggactttatccttttggtaagggatccttagttgttaagtgtggggaaggggcgagggccctgggaccagctctgtgctttaggaaactagtggtaggggtttggggtggaggaagacagatcagacctgcacagcctggctagaggctgtgacgaggaggtaaacagcttcatggggacggaagggagggaggcggcatcagaaaaggcagaacatcaaggtccagacctgggcgcagactgagggagaggaggatccagaatgaggtggaggtttcaggtgctggcgattggcatgggacctcggtgcctgggtgggagccagtctgcagggaatattgtgtgctgggtttgcacatgctgagtcagacactgacaggagctgagccaacaatccagcctggcagaaccacagacacatgttaagggaagagcaatgagtagaacctgggtgacagtcaacccaggaaggcttcctgagggagagaagggttgggtctgtttttttctacaacatgatgatggatgtgagggttactcctgacccagggctattcatgaaccactgatctgagtcctccggtatccctgaccccacccacctgagacctgtccctgcccttgctctgtttctttttccttttcctctcccctgggactctagggatctaatgcagaatcccttagggagggtctcctctgccttcaggaaatgccagagcccactttagagggttgtcttttctgagggttggtctgggaaccggtgtcctgagcttactgagatagaaatcatggattttgaaagagtgttggggggtgatataccacctgcgcacaggactgcagggtcacttaagaaacttggtctggttccctccccacctggtcctttgcgccaaacatggtggattgtccctggagctgagctggagaccttgtttctcatcagtcaggctctggggcagaatttgcccctgctgctccgggcctggcctgctgtccctcccacacttgccatcagcttagtttgcctttcaggacctagctgggccctccattccttgggagatgtctgcaccccattcccctttgcattctttcctgtggaagggcatcttctgccacactgtgcttgttttgtactctccgccgagacaggacctcagtgtccccataaacgctcagcaggtgtttggggaaggaatgcagaattggggcctgtggggctggaattgatgacctagatctgtgctccttcctgcaggcccctggctgtgtctagaggcatgaagaccatcgcctgagttactttggccactcttcttgcaggcccaggggagaaatacctgtctcacctgagaagtgctgggctccacaggcattgagtacgaagcaggggcacccagcctgagccctccctgccctctcctgcccccttctgggggtttcttcaccagctctgcctgctctgtcctcatttccttggcctcagggatggacctgtcaggtctgttgggacacacccagggactgagccctttcctgtaaacatgaccaggttccgctccctctaggttgccccatgtccgctaggctgcttacagcctctgcctttccccagatgtgcttacccaagtcctgataccttttgctgcaaggtcagttcagcctggctcctgctgtccccaaagcacccaaggctgtccaggggcgcagtttctggggagggggcgacatttcacgatcttgctggtcagcctgtacatgatgtgggaaggaggtcaccactcaggactccctcactggaccaggggaaggacctgaagtaatgccctgtgcctcagtttccccatctgtcaaatagggataattatacttgtaatgtccacatcactaggttgctgggaatatcaaatgagtcagtggatgcaaaatactttgaaaatatgatatggtgctttgaggcaggtgctgttatgctggtcacataggatagtacgtggtgaataataggtattaaccaagggtggatccttggttgaaaacttgtcatgtcagaaatggcgttgttttcctagatggagcttgattcatcttttgtcaaggaagtcagactgcatttgtttgatgaatttataccctgccttcttccagaaatgatttaagatggctgattgtgataaagagaatttctgccttggataagggaagggtcaaacttaattttgtattcatttatccctcaataagtattaattgaacatgtagtagctgccaggccctagggttgtgaaaagaaatgtgatttcttttctaaatggtctcctggtcccaaagaaaagacagacaataaacaagtgaatcataacatagcagggcaaatgctgtgatgggtaaggatttgggtagcatggaggagagaagaactaattctgccttgatggggtgagggcaggtggatcagggatggacttggagcagatgatgcctgagctggatcaggaatggtgaggaggacattacagggacaaaaggcattacaggcaggaataggaagtggatgctgtcacatcacatcatgagtcactcaatcatttgatacgctgaattactatgtctctctgtggggcttagtttcctcatctgtacaatgggcattataatagtacatacgtcattggattagtgtgagaattaaatgatcaatgcaaataaagcagcacttagaatagttcccggacatgggaaaagctcagtgagtgtgaactagtattttgtcatgatttgctctgatcagtgattgtggctgctgttattgtgtgtgctgggcactgtgctgggtccccaatggctcacatccagagagagctggatttattttggagggtgaaagactccctgctatgtttatgcaatggctcatgcccttgtgcaatgcagagggaccccaagcagcctccatctcccagggcacggtggatccccagcttcacagaacaggagagctgtggaggagtgtgggcagcagggtaggaatggatttagccctcggcaacaacacatgtccccacaaaacattttcttcatccattcatgtgttgagggacacttgggttgcttccaccttttggctcttgtaaataatgctgctatgaacatgaatgtacaaacatctgtttgaatccctgcattcaattcttttgcatatatacccaggagcagaatgatggatcatatggtaattctgtgtttatttatttgaggaacaaacttgccgttttccataacagctgcactattttacattcccactaacagtgcattaggcttccaattctctatgccctcaccaacacttgttttctgggttttaaaagaagtagtagtcatccttgtaggtgtcaggtggtatctcattgtcgttttgcttcatgttttcctaaagattagtaattttcatatgcttattgaccatttgtatatcttcttcggagaagtgtctatttgagtcttttccccaatttttgattggtttgtttgttttttgttgttgagttgtagggattcttttatattctggatattaatcccttatcagatatttgttttacaaatattttctttgtaacaacagaaacacaccacagtcttcaaggttggaagccagttaatctgagtagcattttgttagtggtggggagaggatttgttcctcctgaaatcctggggaattggccacctcctcttctcctcttaggcatgaagcgcgtctggcttctccaaagaactcttcccctccactacctcagagttagcttcctctcttcagccagtgatcctggggtcccagacacaataattaaccaagagagggtgaaaggctccctgctgtgtttatgcaatggctcaggcccttgtgaagtgccgagggaccccaagcagcctccatctcccagggcatggtccatccccagcttcacagaacaggaaagctgtggaggagtgtgggcagcagggtaggaatggatatagcccttggcaacaacacatttccccacaaagcacccacccaaaagaacaacaacgatagttttagtttttagtaatgagaacaatagttctcatgactaaaagccatcagccaggacacgtgttctcaacccttttgcggtctttggaccctttgaaactctgacagaagccatggaggaatgttctcactgagtgcatgcactcaaaatgatgcattcaacttcaattcagtttcagggatgtatggcctgaccaccaatgcaggggattagcaatcgcaatagtggagagggcatgggagtgggaatctggctggatcaagcaagtggatgccagcagcccagaaaaagagcccccctacctgctttttccttctgggcactattgcccagcaaatgccttcctctttccgcttctcctacctccccacccaaaattttcattctgcacagtgattgccacattcacctggttgagaaaccagagactgtagcaactctggcagggagaagctgtctctgatggcctgaagctgtgggcagctggccaagcctaaccgctataaaaaggagctgcctctcagccctgcatgtctcttgtcagctgtctttcagaagacctggtaagtgggactgtctgggttggccccgcactttgggcttctcttggggagggtcagggaagtggagcagccttcctgagagaggagagagaaagctcagggaggtctggagcaaagatactcctggaggtggggagtgaggcagggataaggaaggagagtatcctccagcaccttccagtgggtaagggcacattgtctcctaggctggacttttcttgagcagagggtggggtggtaaggaaagtctacgggccccgtgtgtgtgcacatgtctctgtgtgaatggacccttccccttcccacacgtgtatccctatcatcccacccttcccaccagagccatagccatctgctggtttggttatttggagagtgcaggccaggacaaggccatcgcttggggcatgaatcctctgcgtactgccctggccagatgcaaattccctgccatgggattccccagaaggttctgtttttcaggtggggcaagtccgtgggcatcatgttgaccgagctggagaaagccttgaactctatcatcgacgtctaccacaagtactccctgataaaggggaatttccatgccgtctacagggatgacctgaagaaattgctagagaccgagtgtcctcagtatatcagggtgaggaggggctgggtgtggcgggggctctctgcctggtcctggggctgccctgggccagcggtcctccctgccacccttcatagatggctatgcctcggctctctctgagatctttaaactctggcttcttcctcctcaatcttgacagaaaaagggtgcagacgtctggttcaaagagttggatatcaacactgatggtgcagttaacttccaggagttcctcattctggtgataaagatgggcgtggcagcccacaaaaaaagccatgaagaaagccacaaagagtagctgagttactgggcccagaggctgggcccctggacatgtacctgcagaataataaagtcatcaatacctca

SEQ ID NO: 45 - DNA, 3170 bp, Homo sapiens
  source 1..3170: mol_type = genomic DNA
aaacactctgtgtggctcctcggctttggtaagtgagctgccagcttccccaggcagaagcctgcctgccgattccttctttccttccctgacccaacttccttccaaatcctcctcctagaagccctccttggttggccctgcctactttaaagcttctttcacattttcttaggtcatgttcccctggggcctcctgccctcaaatgctttgctttttggcactctgtagatattctaaaaaatcattttgtacatgtgtgtgacaggccatctcccagttaagttgcagcctgtgctttctttttattttgcacttcccccactatttctgtgagtgcttagtaggaagtgtcaaagaagcttgacagcattttcttctaagtgtcccaactcttggttttccattacacagacagagtgcaagacgatgacttgcaaaatgtcgcagctggaacgcaacatagagaccatcatcaacaccttccaccaatactctgtgaagctggggcacccagacaccctgaaccagggggaattcaaagagctggtgcgaaaagatctgcaaaattttctcaaggtagggctggactctggcaggtctgacccagcctcaccgcagtttgggttgacaagggaggatgggagtatgggctacagcaatcaaggggaagatttgagctcctggagcccagccccaagacgcagcgagtgtcctgttatacagggcaggtgctcacagttacacaggacgacagggtcaagaaattgctcaattgaacacctgctatttgtcgggccctgttctgggcagagggatgtagtggtaaatggggagcccactattccagtggagggagacacacagtaaagttgttggccaataaagagcacagataaagccaaatgccaataagtgcctggaagaaaatgagatagagtgcgctgtgggcaatggggctgggtggggtggaggtgaccagttagggtacatgagaagggcctctttgaggaggtaacatttgagctgagccccgaatgttggggagggaagcccctgaggatgacacttggcacaaagctgaggagaccctaagcctcaggcgggaacttggggtggaagacttgggggcttttctaatcctaagggtctgcggtggaaaatgaatgcataaagagcacatggagagcacctgcacagcactcagggaactgggaggtttttcccccgctccaaaaatgattaggcagttctaagaaaaaggctgagcacttccaacagcctttttgttttcttttcaaatttggggaaagtcgggaaacagaggcctgcattaagaagggtggaacacatgggtctcagtctcagttccagtcccggagccagacatcctggggtaggtccccagccctcccagtgcccctccctccgccttggtaaggtggagaattgcagccttcagagttaggggccctgacagctctccataggtggaggcctcaggcaggcaggatgctgggtggggtaggcaagaaagggcccagcagagaggccgcatggcaaaactatcctccatgtgaccccctatgcccgcttcaccccccacctgacatcccccaccagaagcaaagcgatgctgtgggaaaggaagcagagcctcatggatgggctgcacaggagagtgctcgcattggctgggtaccccacaggttctgggaggggacttagcgaggtgactcagccagagggtggcagagctggaaccaaccagtgctctcttggaccccgcctgggtctgggtcttccacctcccctgatgtctctcctttttttttttttttttttttttttgagacagagtttcgctcttattgcccaggctggagtgcaacggcacaatctcggctcaccacaacctccacctcctgggttcaagcgattctcctgcttcagcctccagaatagctgggattacaggcatgcaccaccatgcctggctaattttgttattttttgtagagacaaggtttctccatgttggtcaggctggtctcgaactcttgaccttaggtgatctgcctgcctcggcctcccaaagtgctgggattacaagcatgagccaccctgtccgaccatctccccttttatactttatcacacccttgaggtcagcggagcacatactctgctctctgaccctccatctcccctgcccacacctagtttttctaggtgtttccccgttgtattggttgaaataagtttcactaattggtaacctccagagggaagggaagggagggcaggggaaggagtgaagtgcagaggggtagcagagtggaactggcctctaagtcagatctgaatttgcatgccctcaatagtcaagctgtgaaaactaatgaccctctctaggactggtttcaagtcttcctccaggaagataccattcctagctgttaaagttgttataaggaccaaatgaggtgacatttccaggcttactcatgccatgaccagggcaagaccctggaactcagcttcctcttctataaatagagaatcagcacccaagtcacagggtcatggagggaataaactggagagcgtttggtatgtgctcagtgtctgctccattgtgcgcactcagcctatggtcatttttaatttttaaatccagccccagggtgaggcttcccttgtacatttgccagctggtcatttactgtgctcccagtccccacctctggccacacccagctctcacagccttctctccccacccgcagaaggagaataagaatgaaaaggtcatagaacacatcatggaggacctggacacaaatgcagacaagcagctgagcttcgaggagttcatcatgctgatggcgaggctaacctgggcctcccacgagaagatgcacgagggtgacgagggccctggccaccaccataagccaggcctcggggagggcaccccctaagaccacagtggccaagatcacagtggccacggccacggccacagtcatggtggccacggccacagccactaatcaggaggccaggccaccctgcctctacccaaccagggccccggggcctgttatgtcaaactgtcttggctgtggggctaggggctggggccaaataaagtctcttcctccaa

SEQ ID NO: 46 - DNA, 11104 bp, Homo sapiens
  source 1..11104: mol_type = genomic DNA
gtcactgagggttgactgactggagagctcaagtgcagcaaagagaagtgtcagagcatgagcgccaagtccagaaccatagggattattggagctcctttctcaaagggacaggtaaggaaaaaagtctttctttgaattcctggaatttagttgaaaattttggacttcaaaatttgtaaggtgttattgtctagttagttcagttttctgatacaatctggccaggaaatgcatattttaaagtcctctcaccattttccaacattgtataattatagtcacatatccacttacttttgtggctcgtgatctcagccaaggctaaattcatttgaacctacagaatgttttctcatattttttaggagaaaatatttttctttgaattgaaatggactctttctgcattgtagctactcattgaggtttagttgctcttgttgtttttgatgttactgtgtgtatgtagaggaagagagaattttaagaaatacatttgtttagttatgtaattaatgcctagaaaaatttaatagtttggtggtaaccttcaggcttcttataatttggataacctaaatattattgtttcatgcaactttgtgaataattcatgttatgttagggttttaatgtttctatgaaactgttcattcatggactaggtagaatcctttatgtgcctcacttggaaggggaaaaaaagaacaaaaaaagaaagaaaatcctactgcgggttggcaactctaaaaggattttaatggatttatgaaacccccagatttccttacagccacgagctgtgaatccacacatgccagcaacattgaatacacttttttttctgcctgggcacacttattctagtaaagagagtgtgatgacagaacaccttagacttcaacacgcatctgtgcttaaagaggataaaaaacaaagaacaaaatcaaacaagacaatgtatgagttgaaactactaaggttgattttctccaggtttctcaggatctgggcagcgttttgcttcctcttaatttggaacccttgctgtgtactctgactttttactgcaaaacaaattgagagaggccagaggttagaggcccaaactgcatttggactgtcagtaaatactactttgcttcccctggaaatcctccaaaagtctctcccaaacacagggacattttgctgacacagaaatgttccttttaaaatccacactgttctcacccactcttgaacaggttataataaatatataatttaaaaacctcacaaaagggaagcaagtgtcctccttctaccaccctcctcccattaaaacatggtcatgagaatggagttcattgtctcatgattgtaaggactaagagagagagattttttacactaagtcatagagtagagaggataaaatggccaacatataagtatttgtcctcacctaaaggaggtacaagtttgacaaataagcaaaaggaaaggattagagggcagatgactaaaatgttgagtctgagaaagggcttcatccctgtctcacctccttgaaaggcttgcaaggcagcgaacaaacaataaggtaggtattatttttaccttacagttgggttaaaaaaaagcccagagaggtttggtaatgtgctcaacgtcacacagccttgactgcataattccagacaagataatctgattccaatgcctatgcccttgatttgcactgatgtctcttcagactattcaactccaaaggcgaccttatacttgtggccatttagggattgggcccagcttagaaagtcggtggagctgacaaagcaatttccaaagtgggcagatagagcaagcaagaggaaagcccaatcatgagaagccatttgaataaaacaaataaaaaagaattctagaaaatttaatggctgtgttatagcaaatatagtgtcaactaaggggtctatgagctttgttctaaaatatgaaagggagaagggtaaaaaagccaaggagttttatcaaactgagtattgagtatctactatatgtcagctctacactacaaaatatagtgccccacatgtaaagcaagctggactgaaatctaacaatgaggaaaagacaaaaacagacacaaaactaaaggcaaaacatgaaccaagcagcaccctattggggttgaaagaaggagaaatcatgtttacttgattggggagaggcaggtgtgtcaagcaaaaagggagtaaagaagcaaaatgtgtcaggcagaggatagggcgggtcccttgctgccagggacaggaatttaacatcaaggatttgcctggcacccagggcaagtcttctgttcctttgaatggggaaaaaatacttgcttactttgatgccacagccccaatcctaaagatagacacacgtgtcttttaacacattgtctcatctgacaacatgtaataatcttctgcatctaaaagctctgttggaaattaaaatcagaaagatacagaaaggaactgtgcctttagacctctaattgttcaggggactgaggaagacttgccccttggaggaagagtgttagtttccctaatgtcaaaacggcaagggtagaacttcccatcatactgttaagcaggccaaaacttgaaattactgggttggtctttgtttgtagttttcagctcccagatgatgactttttctgttgcctgctttctccccaagagctctagcttacttatgtgagtacatgcacgtaggtctctttcatgtcacactctttcgatgcttttgcccaatcgttcccttggtttgcagagtttctccatcactctgtcttgttttcctaactacctactcatgtcgcaagactcagcttaaacagcatttatttcttgcagcctttactgacacaccctgtccccaacagtgttaagggcatcctgtttttgttactaggacattttatatcatcactgaagcagctatgtattgaaactggagttaaatgcccatatctcctatcagcttatgagggactcaaagtcaaaagccttttcattattggatctcatctaccagactgcttttgcacaaactacttgttcactgtgttgataacatggtttgacgggaagaggggatgtaggttttggaatccaaagacctgaatatgaacataggctctgccacttattagctgtgtgccagtctgaaaaccatataacctttgtgattctagttctttctatttggcataaaagtcattcagtctaccttgctgtgaagattaaaagagatgatgtaaattcctggctctgtaggagctcaaaaaatgatagttacagttcaactgattaaataatgaaaagggttcctgctgtgagcatctgatggtcatgataatgtctgaagtactttattttttaattgttcagccacgaggaggggtggaagaaggccctacagtattgagaaaggctggtctgcttgagaaacttaaagaacaaggtaatttttaagttgaaaaatgatcagcctgatttcctccccactctgaaggaaagagcaggcccctgtgaacctggagtgtgtctggaatatttacatcagaattgcggtactggttacaacccgagaaacacatcctacaaaagcagcagggcatggggagaatgctcaggaaacattgctggatgtacatcctcactcagatattttgtctttccagccaaactacagtataagataaattgtgtgtgcaagaacgggggttggggtggatggtaggggagccgggggaacagcaaatggaaggcaaggtgcagcaggaagtatgctactagcaagaggacccctatttgtgaaataaaataaaataaaacagtaataatgataataacaacagcgcctagtgtgggcgcagtgtgtatatatacatacatatacataagcatgcaaatgcaaatttacgtatatttttaaagtatgggctcaattttctgttacctttacatataagattctgataaagtgttggtcaggatgtggagaaactggaaccctcatatatttctgatgggaatgcaaatgatacagccactttgaaagtaggtgggcagtttctcaggtaaacatatatttacattttgacccagcagttctactcctgggtgcagagaagtacaactacaaacattcaagtacaagtctttgtgtggatatgttttcatttctcttgggtaagagatttgtgcttgaatgtttgggggcagccatatttataataaccaaaaaatggaaacagcaaaatgcccatcaactggtagatggttaaacaaaaagtgtcacatccatgcaacgagatagtattcaacaataaaaaggaatggactggtcgggcacggtggctgaggcctgtaatcctatcactttgggaagccaaggtgggtggactgtctgagctcaggagttcaagaccagcctgggcaacacagtgaaaccccttctctagtaaaaatacaaaaaaaaatagctgggcgtggtggcatgagcctgtagtcccagctacttgggaggctgaggcaggagaatggcttgaacccggaggcagaggttgcagtgagctgagattgcgccactgcaccccaacctgggcgacagagcgagactccatctccaaaaaaaaaaaaaaaagaaaaaggaatggaccgcaaacacaggcaaaaacatggtagatctcaaaagcagcatgataagacaagaaagactacatgtatgattccactgatacgacattctggaaagacaaaagcatagcaaaagaaagcagatcagcagttcctggggttgggggcaagaattacctctaaaggggcaggatggaatttttcaaactcattgacccgcacagttaaaattagtgagttttagtgaacaagaattacacttcgtaaatctttaaaaaaaaaaaaaaaagacaaatacagacacccagtagagaacagaatgcttgggtaatggacttgtcccttaactgacaagcataatttggtcacgtgttgtatcaggtgaaatttcttggaggcgttactaaatcagattcacacagacatgtaacaaataccatatttaatggccaattagttcagaacaccgaactgaatcacagttttacatgacactctctacttttcaagcctaattcaaggccttttagggagcacacccagtccttaggaatttggggttacctgcaatttttccttactaaaaagaataactaaaaagctttatttccgaagcttccaaagtgttaggctcagtgctaagtacatattcacatattcttatttatttatgataataccactatgaggcaggttcaatggatactttgtgtgtctgtgtgtgtgtgtatctccagatgaaaatacaccagtgctttctaaattttctgagaatacatatatataccgatatatatgtatttaattattatcaaaatgaagcatgcttactatagaaaggtaaaaagcacataagcagagagagacagagagacagagacagagacagtggcattccctattaagcccaaaccagaagattatcactgttacattttggtgtctagtttaactggatggattcaagaagtgttcactgagagcccagtatacagccgcaccagtgtgtgatactggtaacatgacgtcaagcaaaagcagacatgggtctaccttcccaagatttacagacctttcaggtttttcctttgcttatacttgtgaatatatgcctattttatacaattgagatcatcctacacagactgatttataatctactttttaatttagtaactcaaaactttttaattttagagtgtgatgtgaaggattatggggacctgccctttgctgacatccctaatgacagtccctttcaaattgtgaagaatccaaggtctgtgggaaaagcaagcgagcagctggctggcaaggtggcagaagtcaagaagaacggaagaatcagcctggtgctgggcggagaccacaggtcttgttgaataactgtgtctatgggaatctggcacaaaggaagtaaccaaggccataagaagagagaaaatttagaaatatagacagaaaagcattgacctatattttatatcaaattttctgcctttaaaaaaattttataggttacttttattatagaaacagacttcgctcaatttgaagtcttacaatatctgtattttgacctagtacagcagaaaatgtatgaaatatgaatggatttcatctaaatattcatcacaagcttacatttctaaataagtatgtgaggcaattcatagcttatttgttcttaattgccgataatatatacaactcatataggtcaacaatttcaaagcatgtgtttttcattataaaagtaatgatcataacatttttgaaagcatcagacacacacacacaagaaaaaaaatgtggtaattgtacttctctagcaaccatttcaaccagaattgaaaatctggcacatttctttcatggcatcttttttttccttgtacatgatgactttgtttaacgtgtgtgtgtgtgtgtatgtgtgtgtgtgagagagagagagagagagacagatgtctatgttgtgttctcactctacagtgcaaatttccttgttgcttcatgggatgtgcataagcatcataagcatcagttttttaattgctgcatgatttttcatcaaggggttacatcgctatatacgtacatattgcggcatattcaggttgcattataattttcaccattacaaataatgtggcaaagaccatttttgtgcatgagcctctttaaatatttactcccaaggcctaggataattttaccagaaaggcctgattagatctaaaagtagaaacacttctatggctcttgagcagtcaatgacttcaggtctccttggcttcctcttctaaagccaaactgtcaccaaggcctctgtatcaaaactgcaattgggaaactgaggctcgctttctttgttaagtggaaattttaggaatggcacatggcaaaagacaagaaacctaaagggaaaacaaacgtccactgaataatccatacctgaacgttaaggcattattgcttccacttcgagaatctaaaagctcatgattctctgaatgatacttaaacattcacaaatgggagaatacaggcattgtatagtactagcttggtgcaaaagtaattgcagtttttaaatggcaaaaccgcaatacttttgcaccaacctaataaatcctaacttttaacttctgtgcaagatatcatttatgtcttccattccagcaaaatgtctggagcttgaagtatttgggatgaactttgttcctggttgagtgggtaactagatgcattgaatagaatgagtgaacacacgccatacgctggctgaagaacttgagtaagaacatgtaagaacttctgagtgatgctctcaaattataaaagctggattttaagaaaaattgaaagactttgtcataattcacttgagagaattaagtatttaccaagagagatgagtgtacagaaaatgatccaaatttaactctgagaattgaacagtgtctcatgctaaggaatttcttgtgtggctagtatttttatactcatttatttttttggctacgctctaatcgtggttttcttacaaggtggattttgggaaaaaaaatcacagtttttttagtaatgcaatcgatgtaaatataactagttagtgagcattaagtgtaagttatgctttctctattgttttaactaattggcatctccaattcagaacctatcagaaatatcagacactgtgactcaaaggaaaaccaagtgggagcattgagtgaataatatgatgtatgtagtgacactgcaaacctgatgttcacacaaaattttttccccaaaagtttggcaattggaagcatctctggccatgccagggtccaccctgatcttggagtcatctgggtggatgctcacactgatatcaacactccactgacaaccacaagtggaaacttgcatggacaacctgtatctttcctcctgaaggaactaaaaggaaaggtaaaagactggttggtactctagtgcaatagaatactttttagtagacattcaggaggtggaagggaaatgagaaactccatgttatcttattcttggtgtaatctcaaatcattttctctgcagccaataagcaaagggttggttgataaaaggcagtgaggctctctatctctgccttgcaaactgacttaatatatattttctctgctaattcttaaactatccttttagtaggtggggcagagagtaatcatttataaacaggtcagtggaggttcagaggttaaccaacttgcccaagatatatgccaagcctatagtgaagcaagggctagcaccaggtctcctcattccttcctctttccactacatgccacacagttctgcattcttactgagtagtccttctatatcatagaggcttttcaaaaaagaaattttaaaatttcagatataatggtttatgaactaatgtatttactgggagaagcacctatctaaatcataagagaaagaactatctccctgctccctagaaactccttttctaaaagatggaaaataaaatggcagattaagatttaatattacagcttataactttgttgatatgccatagtttgttgatatgccatagtatatcaataaaaagtttttattgatacaattataatatttggtccttatgatgatacaagaggttaaaacctccttatgttaaatgctcagaaataatgtcttttgaactaatgaccaagggatgggtttataaacttgcaaagtatctgcctagtacatgggaaaaactaaacgtcctggaggacaaagcagatatcatcatattatcacattaagaataaccaaaggacaggccacaaatttccctcagctgctctaggccatcctctggattaaggacttactgagaaagggaagtaaagaaggaagctaccaaagtaatgggagcacaatcgtttctttatagaggagccctgggaaagaagggcccagcaggactggggcacaaagtaggtaaatgccaactggttcaaggcaaagtcaaagcaatcaaggggaggcacacatcctcttcttaattgtgtattatttttacatgatttcttctgtatttatattctaaatataagatatacgcaatccaatatgtgtctttacctttgaatgtaggatttgttcaagagaatcatacataaccaagtgaaaacattgtaattttagattcccgatgtgccaggattctcctgggtgactccctgtatatctgccaaggatattgtgtatattggcttgagagacgtggaccctggggaacagtaagcttattccttgatgtgatttgcctccatttttgtccctttgtgtgctagatatgctttactgaccaactctatgagagaaaattaaacatcaagacacacacacacacacatgcccacacacatatatttatatacatgtacatacatatgtatgtatccaggcaattaaatctcaattgacttgctgttaaaaataaatacaaataaaactatattgagttaggttcatagaacctaaatgttttatatattttactatatttatatttcccttaaaaggagacaggcgggcacagtcagccttattaattataattatcttaatttctcttttatagctacattttgaaaactctaggcattaaatacttttcaatgactgaagtggacagactaggaattggcaaggtgatggaagaaacactcagctatctactaggaaggtaggattcttttgtgtgtgcacacatgtgtgtgcaacagaaaaggttgctactgacaaccaaagttattaataaagtctttacatgaaataatgggttgctactttttataaaacaagttaacagattattatctatgaaatgtgaagccatcaaccttaaactgaaatcctttcccacttcttaaaagaaagaaaaggccaattcatctaagttttgatgttgacggactggacccatctttcacaccagctactggcacaccagtcgtgggaggtctgacatacagagaaggtctctacatcacagaagaaatctacaaaacaggtagttaacaatctgaggtaatagagaagcaagtgtacacttgactaatatatatttatacctccttgacctgaaaccaagtcccagctgacactttcagaatgtccatcagtcacatgatgcaataactaaagtgttttccatcggttactacctttttctgttagtggataatctttcaagtctgtctgtactactttcaaaatgtcaactattttataaattacattattacaatttgttgttgtagggctactctcaggattagatataatggaagtgaacccatccctggggaagacaccagaagaagtaactcgaacagtgaacacagcagttgcaataaccttggcttgtttcggacttgctcgggagggtaatcacaagcctattgactaccttaacccacctaagtaaatgtggaaacatccgatataaatctcatagttaatggcataattagaaagctaatcattttcttaagcatagagttatccttctaaagacttgttctttcagaaaaatgtttttccaattagtataaactctacaaattccctcttggtgtaaaattcaagatgtggaaattctaacttttttgaaatttaaaagcttatattttctaacttggcaaaagacttatccttagaaagagaagtgtacattgatttccaattaaaaatttgctggcattaaaaataagcacacttacataagcccccatacatagagtgggactcttggaatcaggagacaaagctaccacatgtggaaaggtactatgtgtccatgtcattcaaaaaatgtgattttttataataaactctttataacaaga

SEQ ID NO: 47 - DNA, 14900 bp, Homo sapiens
  source 1..14900: mol_type = genomic DNA
actgaggggcaccagaggagcagactacaagaatggcacacgctatggaaaactcctggacaatcagtaaagagtaccatattgatgaagaagtgggctttgctctgccaaatccacaggtaagagaaggcagtaaaatgtgggaaaatgcattcttcttctcattccttacctggccaagttaacttctactgaacaactgtggttcagtaacttctagtaaacaaacacataaagctgtgtaaaaattagagagctgtaataactgcatctcacttaatttgtcttacattttctccctagaaatggagtcatctatgcatttcttacttacctaacatggatacggagagtggtgagaaaggaaactatagaaagtgtatcagctttacataagaattatatagtaaaatacaaacaatgaggttattacagttgtattttgagaaaaggtgttttgcaaaagccagagttttaaatgagccatgagtcaaacagaaatccctttctcttagggatataacttaaattatgcaaaacatgtgtttctaatttgatggggtttatgagattgcacatcaagcaccttccatgttatattatcattgcttgttatttactgagcgtaagattcaagtgagagtctgaactaccttttttcttgtttgcaagtcttacctataaagtacaaggtatgtggaaaaaaggtttgccttaaaaactacattttctagtctgtcttctaacgaatgctatgtaaaccaatttatcatcaatattttaattatcaaatacagcatttttctaagcaatttacaaattaaccctttccattctcatagccatcccaaaagttatgtatgttatttatttattattattattattattttgagatggagtctcgctctgtcacctgggctggagtgcagtggcacgatctcagctcactgcaacctctgcctcctaggttcaagcgattctcctgcctcagcctcccaagtagctgggattataggcacctgccaccacacccagctacttttttgtatttttagtagagacggggtttcaccatgttggccaggctggtctcgaactcctgacctcaggtgatccaccgatcttggcctcccaaagtgctaggattacaggcgtgagccactgcacccggccagaaacgtatgttattatcctcatgttcctaatgagaagtataaggcatgcagaatgtaattatcaaactatgtagctagcaagtgccagaggccagtatgagcctaagcagcctgtctccagagtctatgatcttaaaaccattattccacactgcctctcttaagaagggataataagacattgcttattttctttctttcaatcttcagtttaacaaggtacatgggattccaggagaagatttctatgaacatgttataataattctgtagacgagtgtatttttgtttgtagctcaaacagttacagtccacatactagagagcacctttaaacacagcaaatgtttagtcagagatttcaacctaactgtgcttagaaatgaaatcctgtaaacaatttggtgatactggcaaatttaaagcatctacctccttccaatctaattttcctcttcagattgttaattaaagaaaatgaaaagtatactttaattttattgccaaaagcactagtttgctttattcatgcaaaacaataatactcaaacttgctatttgcccgcagatctacaaaaatgctgggactggatgatttcaaggatgtacttatcaatggtacaataaaaccatctttttcagaaactactaaactttgtatcatgggttttgtttctcagatattcgattctccttaaaaatgcaacaactgtgataattatgaatacctgtagaacagattccaaggagtaaagcaaaaccccaaaagaaaacaaacgaaactcttccttagctacttaaaaaaaagattctcggctggggacgggtggctcacgcctgtaatcccagcactttgggagacggaggcgggtggatcatgaggtcaggagttcgagaccagcctggccaatgtggtgaaaccccgtctctactaaaaaaatacaaaaattcgcagggcatagtggcatacacctgtaatcctcgctactcaggaggctgaggcaggagaatcgcttgaacctgggagtcggaggttgcagtgagctgagatcacgccaccgcactccagcctgggtgacagagcgagactccatctcaggaaataataataataatagtaattctgacaaggtgcagtggcttacacctgtaatcccagcactttgggaggctaaggtgggtggatcacttgaggtcaggagtttgagaccagcctggccaacatggtgaaacccctgactctactaaaaatgcaaaaaaaaattacccagcatgttggtgtgcccgtagtcccagctacttgagaggctaagacaggagaattgtttgaacctgggaggcggaggttacagtgaactgagattgcgccactgcactccagcctgggtgacagagtgaggccctgtctgaaaacaataacaataataacaattctgctagctgagatgctgcagaagctagattcactgtcccggaaacatgaaaaaaaattattggttacttttatttcttcactgaagatctttcctagaaattatgaaccaaaaaatgtctgttttatctctcataatctatctgcttcttagtccaaaggaaaataatatgttttctgattccatatagatagatacaaggcacaatctctaatctagcagaatttgaatgatcctcagtatgattcatttttaatttatattataccatttagggatcctctgaaccagagcatattactgattaaattttatacttgttgaaagtgctgtcaaataaaatgatcatcattgtgcagaacaaaaaagtattctgttatttggagaaaatcacaacaaccaaaaaaataagatgtactagatggtgaaacatagaataaaaacaacaaaaatacatttattacatttcttttgaaagttggaaacttcacaataaactcgatatacaaaaatcgttatgtaaactgtataagcctgggtttccttatttatgatacagagataacttcttgggccattacaataattaaatatgtatcttttatatatatgaaattatcgagcagagtgcctagtccactattgacatttaaaacatctcattttccttccattcaaagaacttaaaatctagccaagataaaccaaagtaggccaggcgcagtggctcatgcctgtaatcccagcactttgggaggccgaggcaggcagatcacctgaggttaggaggtcgagaccaacttggccaacatggcaaaaccccatctctactaaaaatacaaaaattagccaggcatggtggctcatgcctgtaatcccagctacttgggaggctgaggcaggagaattgcttgaacccaggagacagaagttgtagtgagccaagattgcgccactgcactccagcctgggcaacagagtgagactccaattcaaaaaagaaaagaaaagaaaaaccaaagcagcagataataattgtttaacaatttgaaaaggcataatccatagaatttatagtggaggagattggtttcaaatagagtagtcaggaggattttagtgaaacctttgaggtgaactttgaaaagctgcaaatggcagtgtttgaagagagaggaagaggtggaacacagagagggtcttcagccctgcgtgtgcagatgacaagacagaggctggtgtttccagacaggtaagccatatgccagggcaacattgcacagaatggatgtgaaggcaaggcatactatcagtgggaagccaaatctacaataactgctactactaaataaagatcttttttttttttcaaggaaaatctacctgatttttataatgactggatgttcattgctaaacatctgcctgatctcatagagtctggccagcttcgagaaagagttgagaaggtttgacatatgtattacatttgtcttcttgtatagcttcttaacattgttaacttggttttgaagcataaaacattactgagattgatttgagtcaattgctccatttgttttcagttaaacatgctcagcattgatcatctcacagaccacaagtcacagcgccttgcacgtctagttctgggatgcatcaccatggcatatgtgtggggcaaaggtcatggagatgtccgtaaggtttggagattttctcagatttcttatgctatgtgacagattttcatctaatttacatttaactttccaaaaattttctaaaagcattataactgcatcatgcaaagtttagataacacgacaaaatgataaagaaaatatgccctggcttgacatgtccactgttatcattattatatttttagtcttttacttcatttttcatcctgtattttatctggcaaccctaattacataaaactaatacagactgcaatatctaacctttaaaacacacatgggcctcccagcactttgagaggccaaggccggaggatcacctgaggtcaggagttcaagaccaacttggctaacatagtgaaaccccatctctactaaaaatacaaaaaatagccaggcatggtggcaggtgcctataatcccagctactcgggaggctgaggtgggagaatcacttgaacctgggaggcagaggttgcagtgagccgagatcctgccactgcgctccagcctgggggacaggagcaagactccatctcaaaaaaaaaaaaaaaaaaaaaaacaacaacaacaacaacaaaaaacctaactactgtattttaatcaggtcttgccaagaaatattgctgttccttactgccaactctccaagaaactggaactgcctcctattttggtttatgcagactgtgtcttggcaaactggaagaaaaaggatcctaataagtatgtaaacagtgataacaacaggaatttttggagtgtgtgccgattaaataaaacaggggttgttcattggcttaattttgggcagcgcagctttcctctcagctgggtatggttcctctcagttcctcggctgggtacggtttcttggactgctgtgtctaccactacaaatgtacacatatgtgacaggtgtatagttaacacagtaaaatgcacaaatcttaagtgttcagcttgaatttaactattatatacatacatacacccaccattctcagtaagatacagaattttttatcacctcagaaaatttctttgtgcctctttcaattccctttcctgccacagacaaatatatttttatttgccttatcaaaaattagatgatttttgttattgggtttcatatcaatgaaaccacagagtatagactcttgtgtctggcttcttttgatgagcatgtctttgagattctattaatttaattttttagcagccaattgtggttaagagtcaacacatctttaattacaggcagcaatgactggtttctcagagcagtctgctcaggatataggtgatttttacccatttaggcataagatctgctacaataaaggaaagggagaaccaaagcccacgtctctgggtgtgtgcctgtagaaaaatattctgcaaatgggaatatcataaaatgaaaggattcaatctagaaagtttcttcttattaaaaattagtttttttaaaaaaaaattcaccgggaatggtggcgtatgtctgtggtcccagctacacagggagttaaggcaggaggatcacttcagcccaagaagttgaggctgcagtgagccatgttcgtgccactgcacaccagcctgggtgacagaatgagaccctgtctcaaaaaaataaaaataaaacaactagttttgactgtccatgtgtgttccttgcatatttaattatttcattcatttgtaagttattaagttaaatgtaatgcctactgaagaaacattttaataagctttttctttttacctatgtcttacctctgatagtagcattcaatcaaatagcaacaactcatcattatttgatgttaaattggttttctttctctcttccaattggtccattgcttcatggctgctttcataaggcccctgacttatgagtaagtatctgattcttgtttgattctaagaattatttgttacttatagttgaatgtaggtttatcaatagactccaaatgcatttttaaatgattaattgaattcagccaaaaaataatttaagtgactatttagagaacaaataatctcagtctttaattgtatctatgattgtgttacaactatgtctatctgatattatagctatagatatatacaagaatactactcaaatacatctgtaggaaattaatatgcaaacatacaaaatgcacatacatctgtgtatctatgatttaataactcccatgtccataactagttaccggtgtcaataagtaaccatataccaacttgttctttttgacccaatccttactacttttgacctataatatatactaaacataggctaagagatggaaaacctgggctgggtgcatggctcacgcctgtaatccctgcactttgggatgccgaggcaggtggatcacctgaggtcaggagttcaagaccagcctgggcaacatggtgaaacctcgtctctactaaaaatacaaaaaattagccgggcctggtggcgggcgcctgtaatctcagctactcaggaggctgaggcaggagaatcaattgaacccaggaggtggaggttgcagtgagcggaaatcacgccactgcattccagcctgggtgacagaacaagactccatctcaaaaaaaaaaaaaagatggaaaaactaaggtaaatatcatcagtataaacccaccttggtgaagctagactaatgaagaggaaaggcagtatatgaaaattatgtaaattgcgatatgataaagataaggcataagaagttaaagtattgggatccctaaccaaataaaaggagtgatgggggaacccttgaagcaagttatttgaggaattagctagaggaaaaaggtaagagtattcatagcggaagaaacagcaaaagtgagaccttgaagtgacaaacatcttggtgcgttatcaaagctgaaggatggctaatgtcactgataataagtgataaaaataacagtgtgagaaaaagattaatttttttttttaaagatcgctgggaaaagtgggtgaatcacctgaggtcaggcattcgagaccagcctggccaacatagtgaaaaccctcctcttctgaaaatgcaaaaattagcggggcatggtggcacatgcctgtaatctcagctactcgggagactgaagcaggagaatagcttgaacccaggaggcagatgtggcagtgagacgagattgtgccattgcactccagcctgggcgacagagtaagaccccatctcaaaaaattaaaataaaaataaataaagattatgtaggattttattagctatgataaggagttaaaacagtatcttaagggagaaactggaaggtttttaaaaacgaggatgacatcagcagtcagtctcactttacagatgagaacaccaaggcagacggtgtcatatcttgctcaaggtcacacagcaagtaagttgcagagatggtctggcttcagataccatgaatttaaccaccacaaaactcatagatatacagatagtaagactatgtttgcaccaacgcccaaacttcaattaaaaagaaaaacagggtctaatcagttatttgaatttcgcagtcaattcctttgtaaagcatataaaccactgagaaattgaattaggctcacaaattaaaatgtgaatatgaatataattatttaaacaaaagactacctcttaaaactctacctcgcagatatcctgtgagaagttgacgggataatagaaacagaactagtttgggaatttctaattctgagtgttttttgttgttgttgttttgttttgtttatttgttttctgagacgagtctcgctcttgtcgcccaggctggagtgcaatggagtgatcttggctcactgcaacctccgcctcctgtgttcaagtgattctcctgcctcagcctcccgagtagctgggattacaggcgcccatcaccatgcccacctaatttttgtattcttagtagagacggggtttcaccacattggccaggctggtctcaaactcctgacctcaggtgatccacccgccttggcctcctaaagtgccggaattacagatacagatgtgaactaccatgcccggccctagttctgagttctaatatgaaactttaggtctcagtttaacctacttactattaattatatgatcttggacaatgggcctaaaaaaggagtcttaatattcccaactacataatggagatagtaaggcctgccacacctctctcataaaattatgttgaaactaaaatagcataaataaaaatgtcaaaaaatatcccataatttttgctaaacttcttgccttccttatccaatttcctcaggaacatggacgttttgttctcatttcgtgatggagactgcagtaaaggattcttcctggtctctctattggtggaaatagcagctgcttctgcaatcaaagtacgtctatcctcacttcaaaatttatatgtcaatttacgtaagcagagcaatcacttcggagcctaaactatactaagcatgagttaactttatccttaacaagtacaacatgggatcatttaattgggggtaaaggatcaattatttatttttgtgtattacctaaaatataaaatctcagagccatatacttaaaatccaacttgaaacctctgtaggagataaaaattttcaataaaatctggctttggaactatgatacagtgtcataaattcaatagttttgattatcaaaaatagaaatgaaacatatacaactatataaatatctttaaattaaatgctatgtgaataaaaacaaatccaagcttctataaatgtaaggaaattagtcaaatagagtgtccagcccaggaaagaaatgtaaaaatcccaaatttaatttatggattaagacgggggaatttggcagggcacagtggctcacacctgtaatcccagcactttgggaggctgaagtgggcggatcacttgaagtcaggagttcgagaccagcctggccaacatggcgaaaccccgtctctactaaaaatataaaaattagccgggcatggtggtgggcacctgtagtcccagctactcaggaggctgaggcaggagaatggcgtgaacccgggaggcagagcttgcagtgagctgagatcgcgccactgcaccccagcctggacaactgagcgagactccgtctcaaaaaaaaaaaaaaaaaagaaagaaagaaaaccttaaatgtttgtgttttgtttgtttgttttaggtaattcctactgtattcaaggcaatgcaaatgcaagaacgggacactttgctaaaggcgctgttggaaatagcttcttgcttggagaaagcccttcaagtgtttcaccaaatccacggcaagtgttgtgtgcagtgcaatagtctaggctgacaagtcaaatgttccaggtgtagaatagttgaaaaaagggaagcaaaaagcaactatcacttagtatgttttcactttaggtattttatcttactaaaccattccactttctatgtggtaggtttcattatctccattttataagtaaagtcatctaaattcagaaagacagggtaaatgacttcagattccacaggcggtgaagccagagttccaagctgggtctatttaacactaaggaacttccttgcctcccgctaaaaaccttagagaaactttccacatgggagggtggttttaagtcccgaaaaaaaaaaaatagcttctgcttgataagaactccttcctaattctgtttttttacaaattaagaaacaatacagaaaagtcattgaggtcaaaagttgttgcaaaattaacagctaaaaaactacccacaaaaaaacacacaaaaaagtgcataagcagtaatttgcaataggaaatctgccctactgaacagactcaacaaatacttgattgtttctctctgggttttgagttattgctgtttagtccttggcaagaagctagattttcaaatcaagtagggtaggagactgagtgcggtggctcatatgtgtagtttccagctacttgggaggctgaggtgggaagattgcttgagcccaggagttggggctgcagtgagctatgatcaatacattccagcctgagtgatgaagtgagaccctgtctccaaacaatttttaaaaattttaaaaatagagagggaaatctagtttctagggttttgttttggtttgttttgatttgtttttttttgtctttggtttgtttctttatgtaaacagtttacttgttacgtcagtaagcacgtaaagtaaagtagtgctaaataaatagatacagtttaatgggcttcctggaagagggtaggaaagtgaatgcttatctgcaggggctttgtttagcatagactgacctaatgccttttcctgcagcctgtgccaaaatccattatcagttgtacacaacaccttgatttccctgtatacctctgatgctgcttaattaaacatattccatctttttacagatcatgtgaacccaaaagcatttttcagtgttcttcgcatatatttgtctgggtatgtagtcttatgtttgaatttgtttgctctcacttaacaaagaacaccaccaaattctcttggttggtccctaatatccattgggtttggctaacaatttacatccaaaaattcacatggtagaaaaatactagactgttctgttatcacttggccaggaatgtactggagtgggggacaggaaagctagttattttaaaaagagtggtctgtgctagtacaaaggtaagattccattcctagaatagttatgccaaatctgctcaggattatattatttactattctcatgcttgaaaatgagcaggggcaagggggtatgaaaaaaggatcatgaaatccatctcttgtcaccttctgttcagcactagtgcaagatttggtacctgaaaattagcaattaacctaaagaatgatttttctttttttctttctttcctctgatagctggaaaggcaacccccagctatcagacggtctggtgtatgaagggttctgggaagacccaaaggagtttgcagggggcagtgcaggccaaagcagcgtctttcagtgctttgacgtcctgctgggcatccagcagactgctggtggaggtgagtggaaaataacaagaaataattatctcttatgtgaatacaatagtatttggatatctacaaagcaccttcccatcagcatcttatctgagcttatctgatagttttagcagaatcaggcaagtagggatttggttgccatgatcccattttaaaaatgaagatgcagaaacttaatgagagtcagtgacaggttccttgtgaaccagctagaaagtggcagagctggccaggtgcggtgactcaagcctgtaatcctagcacttcgggagacctaggcaggtggatcacctgaggtcaggagtttgagaccagcctgaccaacatggtgaaacccggtctctactaaaaatacaaaaactagctgagtgtggtggtgggtgcctctaatcccagctactcgggagactgaggcaggagaatcgcctgaaccccacaggcagaggttgcagtgagccaagatcgtgctactgtactccagcctgggcaaaagagcaaaactccatctcaaaataaaaataaaaaataaaaagccaggtgcagtcgctcacgcctgtaatcctagcactttgggaggccgaggcgggcggatcacaagatcaggagatcgagaccatcctggctaacacggtgaaaccctgtctctactaaaaatacaaaaaagtagctgggcatggtggcgggtgcctgtagtcccagctactcgggagactgaggcaggagaatggcgtgaacccaggaggcggagcttgcagtgaaccgatatggcgccactgcactccagcctaggcaagagtgcgagactccatctcaaaaaaaattaataaataaaaacaaaaagaaaaataaaataaaataaattggcagagctttcctcacacccaagttccatcttgaaatctgaacatgtctataaagactggttgactccggtgaagccaatatcacatgctctgaaaatgtatgatcagactcagaaagagacactcacctgcaaatgagacagggctgttagtggggagataaagacctcagtgacaagcagagtctgggccctgctcttgttcagctgtcccgtggccccagccacccagagcaatgcctgcaccaaagtttaaaggtgagccacattcattgtatgccttctaggggcttagctggaggggaggaataagctccaagaagaacttctttttaattttctctgttttgttaaacttctgtttaacagtcaaaggggaaagcatcgggctgggtaaaaacatgagtttttcttaatttgagcactcatttttaaaatttttttatcatatttaacttttttattttagattcaggggatacatgtgcaggcttattacacaggtataatgggtgatgctgatgtttgggcttctaatgatcccctcacccaagtatagaacatagtgcccaataggtagtttttcaacctttgctttccttcctccctccctcccctatttgaaatcctcactgtctattgttcctatctttgtgtccatgtgtactcaatatttaactcccacttatcggtgagaacatgtggtatttggttttctgtttctgcattatttcacttaggctaacttaagctaatggcctccagctgcatccatgttgctgtgaagcgcttgatttcattctttttcatggctgtgtagtattccatggtgtacatgtaccacattttctttgtcccatctaccattgatgggcacctgggttcattccatgtctttgctgttgttgaacactcatttaaacacaatctcttaaactctcttaagaatcagtcataatctgtcaaatgcagattatatatgccccttgtctataccatcagcttcttacagtagaaaagagagaaagaaagtgcaaacaaaggccaggcgcggtggctcatgcctgtaatcccagcactttgggaggctgaggcaggtggatcatctgaggtcaggagttcgagaccagcctgaccaacatggagaaaccctgtctctactaaaaatacaaaattagccgggcatggtggcgcatgcctgaaatcccagctactccggaggctgaggcaggagaattgcttgagcccgggaggcacaggttgcggcgagccgagatcgtgccactgcactccagcctggccgacagagcgagactctgtctcaaaaaaaaaaaaaaaaagcgcaaacaaaaatacttattgtgagaaaatgagtttagctcattcagttttcaaaattaataatattttacaataattacgattgctagtagcaagactaatagccaaacattagccttcaaatagaatgaccttgacctcagtgaatgctatattggtgatctcctgcccactctgacctcactctgcctttctctcctggattggggaatgctgtgacctccgtatttcctctttctctttttcctataggacatgctgctcagttcctccaggacatgagaagatatatgccaccagctcacaggaacttcctgtgctcattagagtcaaatccctcagtccgtgagtttgtcctttcaaaaggtgatgctggcctgcgggaagcttatgacgcctgtgtgaaagctctggtctccctgaggagctaccatctgcaaatcgtgactaagtacatcctgattcctgcaagccagcagccaaaggagaataagacctctgaagacccttcaaaactggaagccaaaggaactggaggcactgatttaatgaatttcctgaagactgtaagaagtacaactgagaaatcccttttgaaggaaggttaatgtaacccaacaagagcacattttatcatagcagagacatctgtatgcattcctgtcattacccattgtaacagagccacaaactaatactatgcaatgttttaccaataatgcaatacaaaagacctcaaaatacctgtgcatttcttgtaggaaaacaacaaaaggtaattatgtgtaattatactagaagttttgtaatctgtatcttatcattggaataaaatgacattcaataaataaaaatgcataagatatattctgtcggctgggcgcggtggctcacgcctgtaatcccagcactttgggaggccgaggcgggcggatcacaaggtcaggagatcgagaccatcttggctaacacggtgaaaccccgtctctactaaaaatacaaaaaattagccgggcgcggtggcgggcacctgtagtcccagctactcgggaggctgaggcaggagaatggcgtgaacctgggaggcggagcttgcagtgagccaagattgtgccactgcaatccggcctgggctaaagagcgggactccgtctcaaaaaaaaaaaaaaaaagatatattctgtcataataaataaaaatgcataagatataa

SEQ ID NO: 48 - DNA, 8690 bp, Homo sapiens
  source 1..8690: mol_type = genomic DNA
atcgttagcttctcctgataaactaattgcctcacattgtcactgcaaatcgacacctattaatgggtctcacctcccaactgcttccccctctgttcttcctgctagcatgtgccggcaactttgtccacggacacaagtgcgatatcaccttacaggagatcatcaaaactttgaacagcctcacagagcagaaggtgagtacctatctggcaccatctctccagatgttctggtgatgctctcagtatttctaggcatgaaaacgttaacagctgctagagaagttggaactggtggttggtggcagtccagggcacacagcgaggcttctcccctgccactcttttttctgagggtttgtaggaagtttcctcagttggagggagtgagagctgctcatcaaggacttctctgtccggttggaggttaactctgtctcttgctctctcatttctgcctggaccaagactctgtgcaccgagttgaccgtaacagacatctttgctgcctccaaggtaagaagccgtcccacggtctgttttagcaaatggggagatccatccccaaatgtctgaacaagaaacttgtctaatggaaaacgagcgggcccaaattaactctaaggtgttagatgttttcaaagaacgagaagtctgatctttactcttaagcatgttttggtctttctggtttcacttgatttagaagacatgtaatagaaagcttacatgctgtagtcctgactcagatcctggtcaaagaaaagccctcttgggttttacttagctttggcatagtgcctggaacgtaggaggcactcaataaatgcctgttgaatgagagaatttttctggcccatacatttctgaaaaaccaaatactctcacagaaacagatattgagatgacaggttgagggagctttcattttgtctaagagacttcctatggcaacagaaaaggtatcgccagagcccctcctcttccacagcctggccacctaacagccctctgggttccggggctggccgtccagagctcctcagcttgctctggccggccgaactcccctccagctcggtctggaaccatcctgctgggcagcgtccagcacatccctgcttcgggctgcctgggcacctcgcctctctgcctcctgtgctgcctcacccccacccctctatctgtagtgggaggagatagatttgacagctgatagtgcattttctctgacaaacacatgactacagccgtatcaatagttttgtgcatttcagttcctgttttcatggaaacacacggctgagaatgaaagccccaaagcctcaatttcacagtggtctcctaactacctgctttccatgcaaactagggagatgatatggccaggagtgaagccctgtgtgttgggcagggtcacactccagcacccagaccatagaacagggcccatcctgcttcatgagggaaactgctcttcgggcctttagctggactatctcatttcattagttatcccgggagtccgatacaggatgagattctgaagggcaaatacacacttttttttttttttgagatagggtcttgttctgtcacccaggctggagtgcagtggtgcgatttcagctcatagcagcctccacctcccaggctcaagctatcttcctacctcagcctcccaagtagccgggacgacaggtgtgcaccaccacgcctggctaatttttgtatttttttgtagagatggagtcttgccattttgcccaggcttgtctcgaacttctgggctcaagcaatccgtccacctcggcctctcaaagtgctgggattagccactgcacctgggcaacagtttatgtgtgtgtgtgtgtgtgtgtgtgtgtgtatatatgtgtgtgtgtatatatatgtgtgtatgtatatatgtgtatgtatatgtgtgtgtgtgtgtgtgtgtgtgtgtataaaatctccaagtccatccaaccgagatggctcctactagaagccaagagtccaccgggttgagcactgggtctctggaggcctgtggcactgctgagaaggctctaacaaagccaagggaagggccacctcactagaagccaggcctggaggaagggtgagggctgagggcctggaggtaagactgcctgtggttttagacccagctctgccactgactagctgtgtggctggccttcagcacatcttcacacctctctgcacctcagtttccacatgtgaagatatgaaagtgattctgaaggtgattgcaaggttgattggaatccagctcttgagttagtgcaaagtgttattgtgagatgatataaccacgattaaaagcaagaacaggtgcagagaagcgatgattctaagaaggaggggaccgggttggaaaggatcaaaccatccaggatgccgagtctggggcaatccatctgggctgtttctggaagacccccgggtgcaggccaggacactgctgccctcccgtccttaactcccctcttcactcagtcctcactcacctccctctcacacacacaaacatctcctagaataatccccactgcctgccttcactcttacccgtctcatttgcctcccctgaacttcatcctcctggagttcacgatctcactcttcactcttttcttcccctcgaagattcagcactgcttacttacatgttaagatatttcagaacagtgaaatgttgctattttcaaaaacctacaaaggtggtatgcagaggaaaaggtacttctttgtgttcccaaagaaaacatctttccaaaatccagcctattgattttatttcttcgggggaacaagaattttagtatctctaagttgggtagcattctactcttggcagttgctggaaagaaggcactggtctaggtcctgggcttcacaggtaacacctgtcagggtgtctatgaagtcaaggctgtctgaggaacagcaaagtgggaagaagcaagctggctggctgatgaagggtttcttgggtggacaagtagttggagctatttcctatttaccaaagagagctaaagttcataattctacagagagttccataatgaacctcaaatacctctgttttttgaaggagtttctcatatacagcactagctgactatcctgggcaggatgggagataatgaatgcagtgccaatcgggctggatttatatggtcctcagtgaggctggtcaagaaccgagttagaactctcacagagtcactgccacagaagaaatctcccaagtggctgtttcctgacattcccgggagggacaggcctccttctgagtcactccctaagcagttctgaactgtgaggtcagccaggctgtccaagtgcactccctgagccactggcagacacactcagcagccagagctagacaggcaggtggtaggagtccagggccacggcagggatggagtgtcgccccctcgctgcgataccagagcaactaaaacgttaaggccttgcactaaagctgcccttaggatgcattcttttaaagtttttccatttaatgcagactcttttcaattcttattttatccttgtttcctttagaaagtcctttcaaaaatatctttagagggttttttcctatactatgtggccatatacgggtcaaaattaagtttaatttccaggctccaagccagcgtttcagaaaaatctcaccaaggtttgtggtaaaagaagcaaagggctgactttttggttttcttgaatctcactgttccctctgcagcagcatgcatgtctgcccacctccagacacacaggcaccatctgccgccccccatcagcccgtgtcccttccacctcgactcgcctacaaagcccagagaggtctgtttcttggcccccagagcccaaagatactgacacactcttacatttccaactagaatcaggaacgaggagtgactctcagtcagttcattaagtaaatgtctttctaaccgctctgcccatgggacatcacgccccacaggggaaaggggaagcttctgtagcctgggattctggtgcctcagtctgggtctagactttcctgaaaaaacgttaaaatatgaactgcattcctagaatttagcctacataaataagagatgaacacaaagatttctatagtttactcactgccgcttatttacagaagcaaaaatctgccacgataggggcctgacaaatgacagtaccactgtgcaatgcgtttctacgcagctctcaatcccatgttctctaataccaccgaagggcttaggaaatgcttatggtatatgtaaagagtaaagaagttacaaaacagtatcaacagttgacccctattttaaaaagtatttttaaaagtgtgacgatatttaccaaaatattaacagcaatagttacctctggctggtgggatgagtgaatgtatttttgttgaatatatgttacctttatagtaaatatatgttatcttgatcatcagaaaaaaaaatatgtaagaacttgaaagctgcttggacagcgctgctgatagaaacccctgagcatcttgtcactgttcttctgattcagagggtctgggtggggcaggggtggtctgagattctgtatttctaagaagctcccagtgatgtccatgctgctggtccatggaccacactttgagtatcaagggaccagagcatgtcgggggagaggctggggatagctttctttatctgaactggataaaggaactgggctcaagctaagaaccctctccaggttctgcatctttgttcttcagtgaaaaatgagaggacacaccaggccaggttcagactgagacacaatccctctcctgggttcccaatgacttgtctcttgtccattcccttctctaaggctaagggcccccaggaagagccatgtggccagaccctcacagttgctggcattccaaggagattctcactccgcatcatttggggccaaaaggccccttacagaagctctgcccaaggctcagatcaatggcacctgctcccagagcctcctctgatctcccaggacacctttccctgatctgtgcacttatctcttgctgcctggcaaaatgtcttagctcctcacttgggccatgtgctgctctcctctcccatggggagagccacacggagagtgctggccaaagcagcagagttcaggccaaaggatgtgcactcatttattcaacaggcatgcaggatttccagggaaagctggattttaaaacctctgggaacaagagcagaacctgactgagagctcatgtgggcacttttcatagcagaatagctcatgaggtatagagacacggacgcagaacgtgggctgtagcgacagatggtcctgcattctagtccccactgtgccttttcctcatgggatgactttattcaggtaccctttcggcaaaatcctccaagagaaaggaaactgggaggttctggggagaaggctgctgcgtttgcaattgggagaggttgttgacagaggtttatgtctgtggcaagcagccttccttcagtggaatacttgaagacaggtctgtagttgagcaaactcacctccatttgtcctcctggaaagaagaaatcaagaggaaaaatctctctcccatcctccaaatggagctggcacattgctatctgtggcatttgtctttccagaacacaactgagaaggaaaccttctgcagggctgcgactgtgctccggcagttctacagccaccatgagaaggacactcgctgcctgggtgcgactgcacagcagttccacaggcacaagcagctgatccgattcctgaaacggctcgacaggaacctctggggcctggcgggcttggtaagctgcactgtattcctggcaagccggccgcgtggctcctggtggacagcagcctcacttctaaacactccttaggagctgcagcacccttggtcaacccattcattcattcactcattcaataagtatttgctgaagttccacaagtgctgggtgtggttctaggtgctgaggacgtgtcactaaagacacgcaggccgagtccctgttctcatggaatgttctaatgggagagttagaaaaacaaacatgtaaaatgatggccagcagtgatacgtgctacaaagaaaaacatagaaataaagaacataagagtcatgggggagggggctgacttaggagctggtgacattatctgagcagatatttgaattgagggagcaggccacatgactaactagggagaccattccaggcagaaggaggaggtatgcaaaggccttaggatggaaatgaactaacttcctgtatttaaagaccagtaggaaggccagtgtggctggatcagagtgagtgaggggtagtttccaggacagcagatcacacaaggcctttagattccaccacgagtatggcagggaacacctgcagagctttgggcaggacaaagactgtacaatctgatttacgtgatttaaaagggtcagtctggctactgtgtggtaaataggctgaaagggggaaagcatagaagcaagatggcctgttgggaggctaccacagtaaaccaggctagagatgatggtggcgtggacagaatgaagcaagatggcctgttgggaggctaccacagtaaaccaggctagagacgatggtggcgtggacagaatgaagcaagatggcctgttgggaggctaccacagtaaaccaggctagagatgatggtggcgtggacagaatgggagcagttgaggtgaacagatttgggatatgactaaaaataaaaccagaaggatttgctgacagatcggttgtagggggtaagatacaggggaggaaaagatgacctctttgttcctgcccaaacccctctggcgatggtcagtactgtttacagagagatgaaagactggcggcaaggcagggctggaggttcagcagaagatcaagagttcaattttgtacatcgtacatgtaaggtggctcttggatagccaagtgaaggtgttgagaagatggttagaaaagtctggaacttaggggagaggtcagaacttgcaatacaaaaaggagagtccttagatagatactgctgaaaatctgaatgacagaaagggagagatcaaaggactgagcctgagatcaacacatggaggtcaggagaggaggatccagccaaggggcctgaggaggagtgaccagtgaggcaggagaacactggagagtgggcggtaccccaggaagccgttgaggacactcaaggagggagggttgactgtgtcaaatgtactgaaaggacaggtcaggtgaggaccaagaaaggcccctgggtttggctgatggaggccatgggtgaggctgatgtaaatggagaggcaggaaggaaagcccagctggagtgggctcaccgaggatagggtggcgagaggagacaaagaaggaacagtgagggcagaacactctttgaagatgtttagctataaggctgcagagaaactgacccacagctgcagggtggttatggagtgagggaagctcttttaaggttgggggtatacccagcatgttaatgcacctgggggaatggtccagtggagcaggaagaactgaagagagcagaaagaggaagaatcattagggggcagaagtccttgtagcccagagtggatgttatctaatatcgagtggaggaattaattggctttagaggagaacaaggacatgtatcccctctctgggcctatcaccttgtagacaatgggataggtcatgggataggaacttggcacaacacatgttctctcttttaattctctccattatcttatgaagcaggcaagtaggcaaacaattgtcccaactttacaaaagaaactgaagcttttataaattaagtagtacatcctaagcaatacaattaataaatggtagagctgagattcaaactgaagcagtggcctgggggtagcatctggaatccttcccacctttagggctgctgtgctgcggtgctgctgtttaatggcacaggagggccacatgactgaatctctctcagcagtccaggcagtcatgcagaaggcccagtagagcaccgggcaggtctgagccagcatcttcaagttccaccctctgagcaagcacctagctgtgacacacctctccagagactgcactcccccccgcgccacccaccccaaaagcagataggtaatggtatacagtaaccatttctagaagtgtaagtagtatgcacccaaaataggcaaaacctgctggcctagtgatagagacaactcccagtcaggctagactggaggccttggttttataagtgttcaggtgacaagtgccacagtaggcttgatcaagtagacaggcaggcaagacaaatgcttaccaatgcaagctaatgaaatgtttcttttgcagaattcctgtcctgtgaaggaagccaaccagagtacgttggaaaacttcttggaaaggctaaagacgatcatgagagagaaatattcaaagtgttcgagctgaatattttaatttatgagtttttgatagctttattttttaagtatttatatatttataactcatcataaaataaagtatatatagaatctaa

SEQ ID NO: 49 - DNA, 23600 bp, Homo sapiens
  source 1..23600: mol_type = genomic DNA
gccgccgccgcccttcgcgccctgggccatctccctcccacctccctccgcggagcagccagacagcgagggccccggccgggggcaggggggacgccccgtccggggcacccccccggctctgagccgcccgcggggccggcctcggcccggagcggaggaaggagtcgccgaggagcagcctgaggccccagagtctgagacgagccgccgccgcccccgccactgcggggaggagggggaggaggagcgggaggagggacgagctggtcgggagaagaggaaaaaaacttttgagacttttccgttgccgctgggagccggaggcgcggggacctcttggcgcgacgctgccccgcgaggaggcaggacttggggaccccagaccgcctccctttgccgccggggacgcttgctccctccctgccccctacacggcgtccctcaggcgcccccattccggaccagccctcgggagtcgccgacccggcctcccgcaaagacttttccccagacctcgggcgcaccccctgcacgccgccttcatccccggcctgtctcctgagcccccgcgcatcctagaccctttctcctccaggagacggatctctctccgacctgccacagatcccctattcaagaccacccaccttctggtaccagatcgcgcccatctaggttatttccgtgggatactgagacacccccggtccaagcctcccctccaccactgcgcccttctccctgaggacctcagctttccctcgaggccctcctaccttttgccgggagacccccagcccctgcaggggcggggcctccccaccacaccagccctgttcgcgctctcggcagtgccggggggcgccgcctcccccatgccgccctccgggctgcggctgctgccgctgctgctaccgctgctgtggctactggtgctgacgcctggccggccggccgcgggactatccacctgcaagactatcgacatggagctggtgaagcggaagcgcatcgaggccatccgcggccagatcctgtccaagctgcggctcgccagccccccgagccagggggaggtgccgcccggcccgctgcccgaggccgtgctcgccctgtacaacagcacccgcgaccgggtggccggggagagtgcagaaccggagcccgagcctgaggccgactactacgccaaggaggtcacccgcgtgctaatggtggaaacccacaacggtgagctcggaggggcaggggagccgggaggggggcccccagggggcgccggagtgccggggccacgggtaggaagtgactggcagaagaaactggctggaggaagaggacaccccggggcaaagggaacgtgtgatggtgggaggggggtgtccgaaagaggatggcactgagccccctaccacccaggtgtctggtcttggagaggaggagatagcgaagtggaccgcttctagagtgcgacagaaacatgcggggtcgtgggggcagtcccctagagggagacaagcaatagggggagggtagaaggctccctcttccaggacgcgttgaatgggggggggggtcgtggggtgccaggtgcagagaagggagcctggtgtgggagaagcgaagaccccagcatttgggaaaggagaggcgctggagaaagttgacccagagcttgggggtcctgaggtggaaagattcaagaaggacagaaaagctagatgaaggcaaccccagagggtgccaggaaagtgagagcggacccacttccagaggctgccaggaacacgcgggatgcgggggtgggggagagtcgtagaaagagaaacagaggtgcgtgtgataaatgtggggagaaagggacgggaggttattggaaggaggaggcaagcgggagaggagcggagactcgggagggcgcccgggatgcagaggtgtcctcggtgtttcacacagggacgtgagggacagagtggggagcccagcggaggaatcgagcttccagaagacctagagtcctgggtcatgggaagggctttaccgagaggggagacaggcgtgggaaaggtggtgtgagcggggaggaggagagatacccagcgccatccacgctgcattccccgcaggatgcaggggaatgggctgagcggagtccagccgcaggggaagtgctgggtggggggtgactctacaagaccgaggtgagaaaaccaagctgggaggagtgagaaagccccacgtgggtgccacgcgcggggggaggagcctgcgcttccaccaaggggcaggaggaccccgctgcgctaaacgctggcagtctggaccccaaagtcccagttcctctcagggtggctggggaaaccccagcgtccggcggcctcatccccctcccttccctttccttcccatgcccccggcggaggcggggatcgctcgcggagcccggggcgagacggggcaggtctggtccccgccctcctggctgcggcgcctcccgccctcctcaccccagctacgggcggggctcccactcagccggccccgtcggcatccatgcgaggacccaggcgtcccgcgtggttcagagccttggggaagatccctcaggtttcactgactcttgggcggtgtgggcttgcgggttccctgcccatttctgcgccagtttacagctccagcccaatgacgcgcactccgcacccaagtctcagccttaccttatcttccgtggcttcaccttcgttgtagaggttcctttaacactgacacctccaatcctcttctccccaacaaatgcacatgtgtctcgtctcgcacgtgtctccccatctgcctctttcttttcgtctccgttagtctttctgtccacgcatgggtctcctggtttttgtctctccgactattttctctccctttctatttttctcctccacggtcctgttgcctcgtctccgtctctgacatctccccgcctctccctctctgcatcaccctccaacccttcctctccctcctctctgtcttcctccctatctgtcttccccagccaaggctctgcctttcctttggggtttgctgagtaacctccgggccaagaatagggcttactggggctgggtggggagggagactggggaggaggaggaggatcgaagggggccgtaggggaggggtttcctctgcctttctcaccagtctcttttcacacccccactatgggaggctggaagcagttgccccagttgatccagcagttcatggcctgttccctcatccccatccccaaacttttcctaaactagaaaataccttggctgggcgcggtggctcacgcctgtaatcccagcactttgggaggccaaggtgggtggaccacctgaggtcaggagttggagaccagcctggccaacatggtgaaacccggtctctactaaaaatacaaaaattagctgggcggggtggcgggcggcgcctgtaatcccagctacttgggaggctgaggcaggagaatcgcttgaacctgggaggcagaggttgctatgagccaagatcgcgccactgcactccagcctgggcgacagaaactccatctcaaaaaaaaaaaaaaaaaaagaaaagaaaacaccttaattccttttctccccactacagccattcctacccagaatgaacttcactttccctaaccagctggggaagggagttaagggtggaaaactaataataaaaataagtagaagaatcacttaggggttaagagcacagtctctagctgggtgggtgtggtggctcatgcctgtgatctcaacatattgggaggctgaggcgtgaggatcccttgagcccaggagttccagcctgccgtgagccatggttgtgctactgcacttccgtctgggggacagagtgagaccctgtctcttgggggaagaaaaaaaaaaagcacagtctctggaatgagacagcttgagtttgaatcccagtctgcagctatgtgaccttggggcaaattacttaatctcggtgcctcagtttctcatctattaaacgggtataataatagtataaggttgtgaggtttaaatgtcttcatctttgtaaagtgctttagatagcatctggtaaatagcgctgttttgtggttttttgttgttgttgtttttgagacagagtcttactctgtcacccaggctggagtgcagtggcgcaatctcggcacactataacctctgcctctcaggttcaagcgattctcatgcctcaacctcccaagtagctgggattagagccgtccggcaccatgcctggccaatttttgtatttttagtagaaacggggtttcaccatgttggccaggctggtctcgaactcccgacctcaagtaatcaatccacctcggcctcccaaagtgctgggattacaggcgtgagccactgcgcccagccagcactcttagacgtatacatgattgagtgaccagtgtatgcagaattggtgccacatggcttgacctgggtcatctaatttcccactataatactggaatgggttctagagtcactctgtcttgtcttacacctggctcagagagaggaattcacttgcccaaggttacacagcgcttaaattaggagagtctgtgtgggaatgcagggagcttaatgttattgctgtttttcaaagaataacaggaaactgacattcagaaagagggtgttaactgcccatggtcacacagccaagaggcagcagaggcactatctgagtccaaagcctgtgcctttgatccttactctgcattttaggggctcttgcatttggggcaaggaaggccagagcaaacagagtggttccccttggtgccagccttagtcgacttgagagatgatgctacatgagagaggaatgtggttaggacctattttacagaggaggaaacaaacctagggggagaaaccacttcctcaaggtcacacagctaaaaagtatcacagtcagggctgggcgtggtggctcacacctgtaatcccagcactttgggaggccgaggcgggtggatcacgaggtcaggagatcgagaccatcctggccaacatggtgaaaccccatctctactaaaaatacaaaaattagctgggcatggtggcatgagcctttagtcccagctgctcgggaggctgaggcaggagaattgcttgaaccctggaggcggaggttgcagtgagcagagattgcgccactgcactccaagcctgggtgacagagcgagtctccgtctcaaaaaaaaaaaaaaattcatttaaataaataaataaataaataaataaataaataaataaataaaaggtatcagagactgactccaccccagagctgtcagctccaaaactcctagagttgggagcaccagctcccctcacctctgccaaacccctgatcgcctcccttcatttctccctgctagaaatctatgacaagttcaagcagagtacacacagcatatatatgttcttcaacacatcagagctccgagaagcggtacctgaacccgtgttgctctcccgggcagagctgcgtctgctgaggctcaagttaaaagtggagcagcacgtggagctgtaccaggtgaggacatgagccagaaggaaggtcagggcatgggctggagagggtgagctgtgaccaagggggtggctgtgggtcggctggttacaaggtccacctagatggtccctgaaggatagaagaacacaaaccatacaatcctagaacgctttttttttttttttgagacagtgtctcactctgttgccaagctggagtgcagtggtatgacctcagctcactgcaatctccgcctcctgggttccagtgattctcctgcctcagcctcccaagtagctgggattacaggtgtgcgccaccacgcccagctaatttttgtatttttggtagagatggggttttaccatgttggccaggatggtctcgatctcctgacctcgtgatccacctgcctcggtctcccaaagtgctcagattacaggcgtgagccactgcgcctggcctcttttttttttttttttttttttgagatggagtcttgctctgtcgcccaggctggagtacaatggggtgatctcggctcactgcaacctccgcctcctgggttcaagtgattctcctgcctcagccacccgagtagctgggattacaggcatgtgccaacacgctgggctaatttttgtatttttagtagagacagagttttatcatgttggccaggcttgtctcaaactcctgccctcaagtgattctcctacctgagcctcccagagtgctgggattacaggtgtgagccactgcacccggaacctagagcacttttaaatgttcagactctttgcatcctaggatgttaaacacttagaaggctggaatcttaggagttggactctttaaggacacaggattcttgaaagttggaatctctgaaaaggttgggggctctagaatcattctgtccaatatgacagccactagtcacatttagcttgattaaaatttaaattgtttaaaattaaattaaaaatttagggccaggcatagtggctcacacctctaatcccagaactttgggaagccgaggcaggcagattgcttgagcccaggagtccgagaccagtctgggcaacatgttgaaacttcgtctctacaaaaaatactaaaattagcctgttatggtgatgcgtgcctctagtcccagctactcagtagtctgaggtgggaggattgattgagcccaggaggtcgaggctgtagtgaactgtgattgcaccactgcattccagcctgggtgatggagcgagaccgtctcaaaaatatatatatataggccaggcgtggtggctcatgcctgcaatcccagcactttgggaggccagggtgggtggatcacttgaggtcaggagttcaagaccagcctggccaacatgacgaaactccatctctactaaaaatacaaaaattagccaggtgtggtggcaggcacctgtaatcccagctacttgggaggctgaggtgggagaatcgcttgaccccaggaggtggagactgcagtgagcggagatcataccactgcactccagcctgggcaacagagcgagactctgtctcaaaaaaataaaaatgaaaaagaaatcctcattctcactggccatatttctagtactctatagtcacatgtggttagcagctactattttggatgttgcagataaagcacatttccagaaagttctttaggacagcactgctctagaagatagggagcttccaagaggactggggcatctggaagggctggaggctctagcagtttctatgagctagaatccatatcagagggaatgttaactcataggatggtagatttcagactttcacagtgagagaactttgtcctatgttagcttggcttcttggagtctggggaattcagctttattctgcagtccctggagtggactatccagccccagaaaattcttcttttttttgtgtgtgtgtgtgatggagttttgctcctgttgcccaggctggagtgcaatggcaccatcttggctcaccacaacctttgcttcctgggttcaagcgattctcctgcctcagccacccgagcagctgggattacaggcatgcaccaccacacctagctaattttgtatttttagtagagacggtgtttctccatattggtcaggctggtctcgaacttctgacctctggtgatccaccctcctcggcctcccaaagtgctgggattacaagcgtgagcgactgtgcctggcccagaaaattattctacacagatgttgggtacctgcagcatctaggtgcggcatggcagactcttgggtttatagaacattagtcttctaaagcttctcaggctctagaagtggaaatcttgggatattatcaaacatttgaatcacaaaatgactttttttttttttgagacagagtctcactctgtcaccctggctagagtgcagtggtgcaatctcggctcactgcaacctctgtgtcttgggttcaagtgattctcctgcctcagcctcctgagtagctgggattacaggcgtgtgccaccacgcctggctaatttttgtatttttagtagagacgaggtttcactttgttggccaggctggtcttgaactcctgacctcaggagatccacccgccttggcctcccaaagtgctgggataacaggcgtgagccaccgtgcccagccggaatcattagaaatgacttctaagttactgagaattcagggtgtcaaatttgcagaaccgtatgctcagtaaaccccagaatgtttgcagcagaattttattttatttattattattattttgagacgaagtctcgtcctgtcgcccaggctggagtgcagtggcgtgatcttggctcactgcagtctgtgtctcccgggctcaagcaattctcctgcctcagcctcccaaatagtggcgactacaggcgtgtgccaccatgcctggctaatttttgtatttttagtagagatggggtttcactatgttggccaggctggtcttgaactcctgacctcaagtgatccacccaccttgggctcccaaagtgctgggattacaggcgtgagccactgcgcccggcccagaatgttagcagcagaattttagcattgtgggctgtccacgctgagtggggcttagcatttcaccaatgaggaaacaggcctcgagaaggcaagaaaacaccttcggctgagctgtgtgaaggtgacttgaccgcagcctgagctttttctccacccctcctctcatgggtactgttggggaggatgggtgccacaggaccacacaggtggctgtctgagagggtagtgcctgggaactttctggaagcctgtttggggaagcagatggggtgaaggattcagttagtgtatgtggggtcgtgacaccatctacccactgtctctctcctgccttcatcatcctctagaaatacagcaacaattcctggcgatacctcagcaaccggctgctggcacccagcgactcgccagagtggttatcttttgatgtcaccggagttgtgcggcagtggttgagccgtggaggtgaggattacttgtgtgtcccacccctgtttctccctggggtccaccccattgtttgtcctggggtcactttgcctaggacccctctccgccccatactggtgtgaaagtgctgagacctggctcccctctgtggcatggaaacctgagtgattggctaatctgtttcctgagcacctctctgccctgccctgtgatgggtgatgccaaggacacagcaatgaccaaaacagccccatccttgccctcacagagctcatatagtccattggctaggtagctggggaacagacctgtaaggcagtgatgacccagagtgggtgggactgggatggggagcccaaaggaggtacctgacccagcccagaatcagggagggcttcctggaggaggggcaccatagctgatgttgaagggatgagtagaatggtcaggaaaaggagaggtgtaagagtattctggggctgggcatggtggcttatgcctataatcccagcacttttgaaggccaaggaggatggatcactggagctcaggagttttgagagcagcctgggcaacatggcgaaacccggtctctacacaaaaatacaaaaattagccatgcatgctgttacgtgcctgtagttccagctgcttgggagactgaggtgggagaatcacctgagcctgggaggtcgaggctgcagtgagtcataatcacactactgcaatccagcctacatgaaagagtgagatcccatctcaaaaaaaaaaaaaaaaaaaagattccaggcaaagggaacagcctgtgcaaaggcctggaggccagggagagcctaactaactcatttgatctgtccaggagatgattgtctctgtctggtttctggcagggcccatggtgcccctatctctctccctcacctccctctcatttatgcttttattcaataattgcccacaggttcctgctgtgtgcctggccatgtgctgggtggtgtgggggacatagtgataaccaagacagccctcagttctgccctcatggggcccacagtcacttctggacacctaagagatcttgtcaaggccccaccaggcaggaatgacctagaatgatcaagaatgggatggggaggcaccagcagggaggacaaggctgggacagggaggcatgcaggatgggggaacgccctaagtgctgttgggagcccagagaaggcacctggacccatctggggagtctaggagggcttgctgggtgagggtgattgtgtggagactcacaggataaatagtagtttggccacatgaaaaaaaagggattagggggcctggcatggtggctcacgcctgtaatcccagcactttgagaggccgaggtgggtggatcacctgagatcgggagttcgagaccagcctgaccaacatggagaaaccccgtctctactaaaaatacataattagctcggcgtggtgatgcatgcctgtaatcccagctactcgggaggctgaggcaggagaattgcttgaacccaggaggtggaggtttcagtgagccaagatcgtgccattgcactccagcctgggcaacaacagtgaaactccgtctcaaaaaaaaaaaagaaaagaaaaagaaaaaatagggattagggagcaggtgggcactgggaggagtgtcctgggctgttcgacaaaggcctagaaggagctcatctgtcttggtcaatgctgagtcccaagcacacagcacaggcttcggcacattgtaggagcctagaaaacatcattcactcattcattcaagagattgatgctggctgggtgcagtggctcatgcctgtaatcccagcacttcgggaggccagggcaggaggattgcttgagcccagcctgggcaacatagtgagacctctgtctctacagagaatttaaaaagtagccgtgtaggccggatgcagtggctcaagcctgtaatcccagcactttgggatgccaaggcaggcggatcacctgaggtcaggagtttgagaccagcctggccagcatggtgaaaccccatctctactaaaaatacaaaaaattagccgggtgtggtggcgcatgcctgttatcccagctacttgggaggctgaggcaggagaatcgtttgaacctgggaggtggaggttgcagtgagctgatatcacgccactgaactccagcctgggcaacagagccagactccatctcaaaaaaaaaaaaaaaattagccatgcgtggtagcacgcgcctgtggtcccagctactcgggaggctgagatgggaggattgcttgggccttggagattgaggctgcgagaccttgtctcaaaaaaaaaaaaaaaaaaaaaaagagagagctgcagtgagagggcagagtggggtgggtgggggaggcaggaaggaagcccctggggtttgctccttccttcctcttcctccaggggctgggtgagctgcactctcagactggcttccctctcgccactcctacaggggaaattgagggctttcgccttagcgcccactgctcctgtgacagcagggataacacactgcaagtggacatcaacggtgaggcctgcttccccggccatgcccagttgtgacgtgtgtgcgtgtgtgtgttcccatctgccccacgccccacttatctatccctctgagagtgtgtgtgtatgtcccctatcccctgactcccacaccaaagcagggttcactaccggccgccgaggtgacctggccaccattcatggcatgaaccggcctttcctgcttctcatggccaccccgctggagagggcccagcatctgcaaagctcccggcaccgccgagccctggacaccaactattgcttcaggtgagccttgtagcctggatggaggccttccaggctgggggcatgactgccatctgctgaccaggtgctccaggttggacacctggctgctgctgtgcttgggctgagcatctgtctcctttagcttggagggctcaggggatgaggtctgggtgtaagaaccaggagtcttgtgccaggtgcggtggctcacgcctgtaatcccaacactttgggaggctgaggcaggtggatcacctgaagtgaggagtttgagacctgtctggccaacatggtgaaacccgtctctactaaaaatccaaaaattagccaggcgtggtgggcgcctataatcccagccacaaaaaacaaaaaaagaactgggagtcttgtaatgttgggatcaggttcctttttttttttttttttttttttttgagacagagtctcgctctgtcacctgggctggagtgcagtggcgctatcttgattcactgcaagctccacctcccgggttcacacgattctcctgtctcagcctcccgagtagctaggactacaggcacgtgccaccacgcccagctaatttttttgtatttttagtagagatggggtttcactgtgttagccaggatggtctccatctcctgacctcgtgatacacccacctcagcctcccaaagtgctgggattacaggcgtgagccaacgcgcccggcctaattttttgtatctttagtagagactgggtttcaccatgttagccaggatggtcttgatctcctgacctcgtgatccgcctgcctcagcctcccgaagtgctgggattacaggtgtgagccaccacgcccagccttgctttcttgctggagtgttggaatcacagaatgttagaaagttgaaccctgtgattgttggaattcaaagttggaaggtcaccatcttgaatccctaaattgttggcaggttgaggttctagaatgctgggattctagaatgctagaatttggtgttaattactgaaatggaaaatgtcggactcaaggaaagctgaaacattggaatcctagaatttggggattcaaaatgggaagatggcccatgtggaattcctgcaccactggccaattgtggataccagtgttggcagattggagtccttgaatattgggctcacagtggtagaattctgttttgaaatattcacatccacaaatgttggagttggagaaagcagaatattggtatctcagcatgttggaactcagtgttggaatgttagaatattagaatgctgggattttattaatagaaagtggcagcaggctgggcgcggtggctcacgcctataattccagcactttgggaggctgaggtgggcggatccctgaggtctggagttcaagaccagcctggccaacatggtgaaaccccatctctattaaaaatacaaaaattagccaggtgtggtggctggcacctgtaatcccagctactcggctgggattacggctatccaggtacccaggctggggcaggagaatcactggaacctcgggggtggaggttgcagtgaaccgagatcgcgccactgcactccggcctgggcaatgatgcgagactccatctaaaaaaaaaaaaaaaaaaaaaaaagaaagaaagtgtcagtttgaacctcttgagtgatggctcagaactttggaatgttgggatgcaatactggcatactggaattcaggaatgccaagatcctcaaaggttggaaagggggaatcctagagagttgaagatgctgtcagaatgttagaatcataagatgctggaatgctaatactgcaatctaagaaagctgaaatgttggattcctagaaagttgaaatggagagttagaatgttgtaaatttagagtgatcatctgaccttattcctcccttgcttaaaatattttggtcctgtctctgggctttgttaccggctgtttccctgccagaaaatcagccctgctcccaggctccttcaccaccagatcttagcgccatcagcccagcaacgctgtcaatgaacaaattgaggtcttttttgagacagagtctcgctctgttgcccaggctggagtgcagtggcgtgatctcggctcactgcaacctccgcctcccaggttcaagtgattctcctgcctcagcctcctgagtagctgggattacaggcgtgtgccaccacacccggctaatttttggtttttttagtagacactgggtttcaccatgttggtcaggctggtctcgaactcctgacctcgtgatccacccgcctcggcctcccaaagtgctgggattacaggcatgaaccactgcgcccggccacaaattgaggtcttgagtgccaacagctcctgacattacaaagggagatagccagccatgtcagcctccgtagggagggacccaatgttgcctaggaagtcttggcaaaaaatcaaacctgaaggccaggtgcggtggctcatgcctgtaatcccagcactttgggaggccaaggcaggcagatcgcttgagcttaggagttcaagaccagcttgtgcaacatgttaaaaccctgcctctgtacaagaaatacaaaaaaactagctggctgggtggtgtgtgcctgtagtcccagctacttgggaggctgaggcaggagtgcttgagcctaggaggttgtggctgcagtcagccaggatcacgccactgcatttcaggacagagcaggaccttgtctcaggaaaaaaaaaaaaaaatcaaacctgaatctgatcaggactgtagatcctaacagttttctagaaagacaggaacagaggaaatggtcagcaaaactcagactgcaagaaacctcacccagtttcttcatcaaatacaatgcaaagaaggggaaagcacacacacacacacacgtaccccccatgcaaccaaaaattcacatacaagttttgactccccaaaaacttaactattaatagcctactgtggactggaattctgctttatccacaacataaacagttgattaatacttttttttttttttggagacagagtctctgtcattcaggctggagtgcagtggtgcggtctcggctcactgcagcttctgcctcccgggttcaagtgattctcttgcttcagcctcccgagtagctgggaccacaggtgcccaccgccacgcccagctaattttttgtattttagtagagatggggtttcaccgtattgcccaggctggtcttgaactcctgaggtcaggcaatccgcccacctcagcctcccaaagtgctaggattacaggcatgagccactgctcccggccgaataatacatattttgcatgttttatgtattatgtcctatatcccctttttttttttttgagacggagtttcgctgttgtcactcaggctggagtgtaatggcacaatctcagctcacggcaacctccacctcccgggggttcaagcaattctcctgcttcagcctcctgagtagttgggattataggcacctgccaccatgcccggctaacttttgtatttttagtagaggtggggtttcaccatgttggccaggctggtcttgaactcctgacctcaagtgatctacccgcctcagcctcccaaagtgctgggattgcaggggtgagccacgcacccggccgtattctttgtttttttttttgagacagagtctagctgtgtcacccaggctggagtgcagtgaagtgatctcagctcactgcaacctccgcctcccaggttcaagcaattctcctgcctcagtctcccaaatagctgtgatttcaggcatccgccatcgcacccgggtaatttttgtatttttagtagagacggggtttcaccatgttggccaggctggtcttgaactcctgacctcaggtgatccatcagcctcggcctcccaaagtgctggccttacaggcttgaaccactgctcccggcctatgcctgcattttaaaaataagatagagaaaagaaaatgtccttaagaaaatcataaggaagaggaagtatattttccattcattgagtggaagtggcttatcataaaggtcttcatgttgagtaggctgaggaggaggaagaaaaggtgttggtcttgctgtctcagggcagaggtggaagaaaaattcacctgtaagtggtgaattttgtaagaggacccatgtagttcaaacccatgtccaagggtcagtctatatatagttgaccctgaatatatatacagagagagagagagatgattttgtagattttgaaaaaagtcctaagagaggccaggtatggtagctcacacccgtaatcccagcactttgggaggctgaggcaggtggatcacttgaggtcaggagttggagaccagcctggccaacatggtgaaaccctgtctgtactaaaaatacaaaaatcaggccagctgtcgtggctcacacctgtaatcccagcactttgggaggccaaggtgggtggaccacctgaggtcaggagttcgagaccagtctggccaacgtggtgaaacctcctctctactaaaaattcaaaaatgagccaggcgtggtggcgggccctgtaatcccagctactcttgaggctgaggcaggagaactgcttgaacccaggaagtggaggttgcagtgagccgaggtcgcgccattgcactccagcctgggcaacaagagtgagactcccgtctcaaaaaaataaataaataattaaaaatacaaaaattagcagggtatggtggcaggcgcctgtagtcttagctacttgggagactgaggcaggagaatcacttgaacctgggaggcacaggttgcagtgacccgagattgcaccacttcactgcatcctgggtgacagagtgagactccatctcaaaaattaaaaaaaaaaaaaaatcctaagagacatatcaaccaattgcaatgtgtagaccttacttgaatccttatttacacaggcttaaaaaaaaaagatatttatgagacagttgggtaaatgtgaactctgtctagatattcctctagatatcaaggaattgttaattttcttacatggtattgtgactgtgttttaaagtagtcttaattagagatacatttgaaatatttatggatgaagcaacacggtggattgcatgtgctttgagataaaccattgtcggctggctgcagtggctcacagctataatcccaccactttgggaggccaaggcaggaggattgcttgagcctaagagttggagaccagcctgggcaatatggtgaaaccccatctcccaaaaaaaaaaatatgaaaagtagctgggcctggtggtgtgtaccttttgtcccagctactcaggaggctgaggtgggaggttggcttgagccccaggagctggaggccacagtgagctgtgattgcaccactgcactccagcctgggtgacagagtgagatcctgtctcaaaaaaaaaaaaaaaagagatagtggataggggtagagatgcaatggaaattggccatgagttggtcattgttgaagctgcttttgtgtacatctgaaactttccagctggacgcggtggctcacacctgtaatcccagcactttggaaggctgaggcgggtggatcacatgaggtcaggagttcgagaccagcctgtccaacatggtgaaaccctgtctctactaaaaatacagaaaaattagctgggtatggtggtgtgtgcctgtaatcccagctacttgggaggctgagccaggagaattgcttgaacttgggacatggaggttgcagtgagccaagattgcaccactgcactccagcctggggcaacagagcaagactccatctcaaaaaaaaaaaaaaaaaactttcataggaaaatttgttcttaaggcagctcgaacactacctccttcctaacccctttctccaacatccaagatggatgtgaggcctctgggctcccctggggccctaagtagatctttgactcaacaaacagtctctgttgggtcttttatttataaaaagttttgtagcgacagggtctcactatgctccccaggctggtcttaaactccttgggctcaagcgattcaccggtcttggcttcccaaagtgctgagattacaggcgtgagtcactgcacctggcctaggtcttgagagactggacggaagaggcttggcaagggcaagggctgtgggtatcccaaggcccggtgcagggtaggccccgaatgtgtgctgaaaaaatgagtcagaggatcacctagacggcttgttcaacacggactgttgttcccagtcctgcacacaatttctgatttcagtggcctggggtgccacctgagaatctgcatttcccatagttcccaggtgatgctgccgctggtcctgggagctcacgtggagagctgctgacttggataacagtatcacagattgttcaaatcctaggatctcagaaccccagctagggttgaactgcatattaaagatgattctgagccgggtgcggtggctcatgcctgtaatcccagcactttgggaggccgaggtgggtgggtcacctgaggtcaggagtttgagaccagcctgaccaacatggtgaaacccagcctctactaaaaatacaaaaaattagccaggcatggtggcacatgcctgtaatcccaggtacttgagaggctgaggcaggagaattgcttgaacccgggagacggaggttgcagtgagctgagatcacaccatcgcactccagcctgggcaacaggagggaaactccatctcaaaaaaaaaaaaagattccggacactagttcttccccttttgtgagttcagaacttcctgtgagaaagtgaaagccaggactctttttcccagaaatacatgcatacatacacacatgtgcatatgatctcaggcactcatggccctccctaagcctgcccatgatggccccttggccctcagcttaacaccttattttatctagtagctcctacctctgaacagatgaggaaactgaggtccaaccaaattgggtggtacgggctgagttcacagggatctcagtttcttgacttccttctcaggcttctgtggctcttggaaaggctttatcttgcctctaggttatccggtgccacttgaagttgggttcaagcgattctcctgcctcagactccccagtagctgggattacaggtgcccgccaccaggtccagctaatttttgaatttttagtaaagacagggtcctcaagtctgcctgccctagcctcccaaagtgccgggatgacaggcgtgagccaccgtgcctggctggccccaccaatctatgagcagaggttgcagtgagccaagattgcaccactgcactccagcctgggtgacggagcaagactctgtctcaaaaaaaaaaaaaaaaaaaaaaggcattgtcaactttttcttttcttttctttcttttttcttttcttttcaagacagagtctcaccctgttgccctgggtggagtgcagtggcacgatcttggctcactgcaacctctgcttcttgggttcaagcagattcttgtgcctcagcctcctgagtagctgggattacagacaagcaccgccacacccagctaatttttgtatttttagtagagacggggtttcgccatgttggtcaggctggtctcaatctcctgatctcaggtgatccacccgccttggcctcccaaagtgctgggattacaggcgtgagccactgcacccggcctctttgacagttctaagaagtaaaataaaccagaagaaggcaggcagagagtaatagatattgggaactgttatttttcctattctgatttaaattcctttattatggaaaatttcaaatgtatacaaaagcaatgaagataatgaatgcccgtaaactctcatccagcgtcatcggtaattaagattttgccccatttcaaatgcagacatttttatattttcttgcataactgcaataccgtattgcactaaatggaactaacagtcacttggatattttggaaaggatggctcagaaaggtatctctgaggaggtgatgttcagtcatgtaactgatatttactagtacctactgcattccagacactgctttaggagttaagggtccctgagtgaaggacatttgagctaaggtttaaatgaagtgaaggggccaggtgtggtggctcatgccagtaatcccaatgctttgggaggccgaggcgtgcggatcgtttgagcccaagttcgacaccagcctcagcaacatagtgagaccgtgtctctaaaaagaataacaaattaaaaagaataaataggccagatgcagtggctcaggtctgtaataccagcactttgggaggctgaggtgggcggatcacaaggtcaggagttcgagaccagcctggccaacatggtgaaaccctgtctctactaaaaagacaaaaaaattagccgggcatggtggcacacgcctgtaatcccagctactcggaaggctgaggcaggagaatcgcttgaacctgggaggcggaggttgcagtgagccgagatcatgccactgcactccagcctggcagacagagtgagactctgtctcaaaaaaaaaaaaaaaaaaaaatagaaaaaaaaagaagaaatgaagtgaaggaacaagctggagtgggtatctgtgggactagcaaggcaggcagagggaacagcagatgcaggagccccgaaataagactgtctgaggaacagacaggacgccagtgtggctggagtggagtaggcgtgagagagggagttgagatcagccagatttgatagcaccttgtggctcacggtgaggacttgggcatttgccgtgagatggagccaggttcagagcagaggagtgacaagacaatttatagcatgcccatggagggcagagatttctgtctcttttttaaaaaaattgaaaaaaaattttgtagagacagggtcttgcactttgttgtccaggctggcatgcagtggtgttatcatagttcactgcaacctcgaactcctcgactccagcgatcctcccacttcatcctcccaaagtgctgggattaaaggtgtgagccaccatgcctagcctatttctatctgtttcatttgtcctcagtccacagtagatcccagcccagcacacagtagtagttcaataaacatttgttgcacaaatagagcagatcagtttacatggagctgtgttattttgtatgttccagggtgtggcatgccatgatttatttagcccccccgtggatggtcatctggcttcttacaggcttgtcttaagcattgcgtgaaattaattattacattgctcttagcactggaggaagtgcttaatctgtgttagtgattatcatgactatttgtgttgttattaacacagtgggtgcaagggagacccagatggagatagggctgggggggcaacctagggtgacacacgcacctggggaggaggggcatgtggcttctatggtggtagcccctccctgcccctgacgcgtctctcctgcctgcagctccacggagaagaactgctgcgtgcggcagctgtacattgacttccgcaaggacctcggctggaagtggatccacgagcccaagggctaccatgccaacttctgcctcgggccctgcccctacatttggagcctggacacgcagtacagcaaggtacgtctggcccaccgggctacgagatgcgcttggggggagccaggacggaggaagaggagagagaaagagaagtaaagtcagagaggtgagttggcaggatggggagaaagagagggatggggtggggaggggaatgaataaagagatggggagagaggcaggaagctagagaggggctctgagcaggggccagagggagatgagctatgaagacccacagagtgaagtaacagagggatgggggtgaaggggagaagagagacagggagatggaaggaaaaacgcagaaatggagagacaaaatgagagagacagatacagacacagagttaggccaaggagagacaaagacagatacacaacaaggcaagaggcgaagatgaggagggacagagactgagaaagaaaatcaggcgggcgcggcggctcacgatggtaataccaacactttgggacgctgaagcaggaggatcgcttgagcccaggagttcgagagtagcccaggcagcagactgagatcccatctctaccaaaaaaaaaaaaaaaaaaaaaaaaaaagctaggagtggtggcgcttgcctgtggttggagctactccggaggctgaggcgggaggatggcttgcgctcaggaggttgaggctgcagcgagccatgatcgtgccactatactccagcctgggtggcagagcgagacccagtctcaaaacaaaaagaaaatcagacaggtggggagagacagaataagataggatgttagaagataagagagaccgaattggagatgggaagaggggatgcggggagagacgaagtgagagaggctggcgcggtagcgggtgggggatggggcagtggagggccgttttcctccctccacgagccctgagccctgaccccgcccgccgcccgcaggtcctggccctgtacaaccagcataacccgggcgcctcggcggcgccgtgctgcgtgccgcaggcgctggagccgctgcccatcgtgtactacgtgggccgcaagcccaaggtggagcagctgtccaacatgatcgtgcgctcctgcaagtgcagctgaggtcccgccccgccccgccccgccccggcaggcccggccccaccccgccccgcccccgctgccttgcccatgggggctgtatttaaggacacccgtgccccaagcccacctggggccccattaaagatggagagaggactgcggatctctgtgtcattgggcgcctgcctggggtctccatccctgacgttcccccactcccactccctctctctccctctctgcctcctcctgcctgtctgcactattcctttgcccggcatcaaggcacaggggaccagtggggaacactactgtagttagatctatttattgagcaccttgggcactgttgaagtgccttacattaatgaactcattcagtcaccatagcaacactctgagatgcagggactctgataacacccattttaaaggtgaggaaacaagcccagagaggttaagggaggagttcctgcccaccaggaacctgctttagtgggggatagtgaagaagacaataaaagatagtagttcaggccaggcggggtggctcacgcctgtaatcctagcacttttgggaggcagagatgggaggattacttgaatccaggcatttgagaccagcctgggtaacatagtgagaccctatctctacaaaacacttttaaaaaatgtacacctgtggtcccagctactctggaggctaaggtgggaggatcacttgatcctgggaggtcaaggctgcag

SEQ ID NO: 50 - DNA, 99284 bp, Homo sapiens
  source 1..99284: mol_type = genomic DNA
gatgttatctgctggcagcagaaggttcgctccgagcggagctccagaagctcctgacaagagaaagacagattgagatagagatagaaagagaaagagagaaagagacagcagagcgagagcgcaagtgaaagaggcaggggagggggatggagaatattagcctgacggtctagggagtcatccaggaacaaactgaggggctgcccggctgcagacaggaggagacagagaggatctattttagggtggcaagtgcctacctaccctaagcgagcaattccacgttggggagaagccagcagaggttgggaaagggtgggagtccaagggagcccctgcgcaaccccctcaggaataaaactccccagccagggtgtcgcaagggctgccgttgtgatccgcagggggtgaacgcaaccgcgacggctgatcgtctgtggctgggttggcgtttggagcaagagaaggaggagcaggagaaggagggagctggaggctggaagcgtttgcaagcggcggcggcagcaacgtggagtaaccaagcgggtcagcgcgcgcccgccagggtgtaggccacggagcgcagctcccagagcaggatccgcgccgcctcagcagcctctgcggcccctgcggcacccgaccgagtaccgagcgccctgcgaagcgcaccctcctccccgcggtgcgctgggctcgcccccagcgcgcgcacacgcacacacacacacacacacacacacgcacgcacacacgtgtgcgcttctctgctccggagctgctgctgctcctgctctcagcgccgcagtggaaggcaggaccgaaccgctccttctttaaatatataaatttcagcccaggtcagcctcggcggcccccctcaccgcgctcccggcgcccctcccgtcagttcgccagctgccagccccgggaccttttcatctcttcccttttggccggaggagccgagttcagatccgccactccgcacccgagactgacacactgaactccacttcctcctcttaaatttatttctacttaatagccactcgtctctttttttccccatctcattgctccaagaatttttttcttcttactcgccaaagtcagggttccctctgcccgtcccgtattaatatttccacttttggaactactggccttttctttttaaaggaattcaagcaggatacgtttttctgttgggcattgactagattgtttgcaaaagtttcgcatcaaaaacaacaacaacaaaaaaccaaacaactctccttgatctatactttgagaattgttgatttcttttttttattctgacttttaaaaacaacttttttttccacttttttaaaaaatgcactactgtgtgctgagcgcttttctgatcctgcatctggtcacggtcgcgctcagcctgtctacctgcagcacactcgatatggaccagttcatgcgcaagaggatcgaggcgatccgcgggcagatcctgagcaagctgaagctcaccagtcccccagaagactatcctgagcccgaggaagtccccccggaggtgatttccatctacaacagcaccagggacttgctccaggagaaggcgagccggagggcggccgcctgcgagcgcgagaggagcgacgaagagtactacgccaaggaggtttacaaaatagacatgccgcccttcttcccctccgaaagtaagtacttattttgacttccatcccctgaggtttagctctgcccggagctctcaaaaccgcagcagctcccgggatcgcccttccctctcgcggttcccgttcgctcttttcccgttctcctgtccttcaccccaccacctccttttcagttgtatgcttgaggccatcaggctttaaaatgtttactttctactttattttctccatctttcccttccccctaacaattcggtgctttaaaaggcgttattctctttttctcttccctgaagttctttagtcggccaccagctaggagtcagccccactctgtcaaactagaggtgctcccaggggcagagttaaactgaggaatcttggtaggtttgttttctttgctccgattggcgtggagcgcgccgaactggtgcacgaagggttaaaaaaagtgtctcaaaactagcctctccggaaggcgccccctttccgtgctgacctatcagctggttccccaagccttctctattgtctctaactaccctaaaaatgtcagcatcgccgagacaaaacccggtttggagacccctcgagaaacctacctggccctcagtccttgatgtatcatttgctatcactaggtgtttcattacccaaaggcaaaatcctataaccacgttcccttttcacttaacctggagtgtagaaaggacaactccgtttctgactgtgttttaaaaggttttgttcacgttatttttcagaatacactcaaacctgccttcttcacatctccagtgtagcagatcatttttcttacgggtctgttatcctgctcctgccttttcgtaggcttcctgcagttacttcaatgcattcctaaaactcagagtagacgacagccgtattttttttttttttttttactggcttctctgagaacagtgtcctcaaaaccagctggcatacagtagcaataggagtgaaatgatttattgcagaggaagggaacagacagtgtagaatgatttcagagttcttaaaaaaagaaaaaaaagaaagaaagaaagaaaaggggcagcagcatccacttgatacctgagagggttaaataccaggaagaagaaaaagaaaagtgggggcggggtggggggaacctcttcaacatttgtgtattccaaatcccaagtcataaacttttcattggttgctcatttctctcctcccctttccatgccctgtatacttgctggctgcctttgcaaagtctctgtgtcttgcctaaatagataatatagccatcttggtaattttctcttaaaggttctagttgcagggtggtgcttttcttttttaatatttatttttagtttgacaagtcctagctatgtgacctgccatgtcttgtacttgatggtctcagaagtcagcccatgtatctaaccccagtcttcctagtgacccttattttgctgcagtttctcctgttcttgttcaatagcagaacagatgcagagaattctggcaagcaggatgattttattattgtaattatggcactatccgcaacagcggtgataaatacactccacccctggttatcccctttgggaagtaaagctttctatctggggtggagccaaggagatattaggaaagaaagttcattgtaattagtccaaaaccattgagacaaacaaggagttcagtcagtttgctttctctagcatgtgcatcggttctaccggtatttgggcagagcggaaagtatgttatgtagaacctgaataactcatctttcaatgtttatatgcaaaaggtctaataaactgccagcacttctataacacagaaaggagctctgatcccatttactgaataggtgtggagagagcaagtaacccaagagggcattagttctttgttctctgaagcacacttcagtctgaagagctgagatgatccaacccagggtcatggtcatcaacaaactggaaaaattcctagattattaggaggatttcagagtatggcatttaacatcaatgtgtggattctcctttccatttcaccccagccaccaaataaatgaaaacctccgatacgtccaagataaataaaatatactgccagttttcatacaaagaatacaggctttaaaaagtctgtattctgtatggaagtttaggagcagaaagccatattaatagcaggttcgatactactgtgcaaggactggataattttatagaaaataggttaactgattttccagcactttttagttatactggaatatagcaaacccttccaaaaaaaaggaaaaaaagaaaaaaaccatatttttaaaaagcaaattgaaagtacagcattggcttatataccagctttccctctttaggacttttctgcctaacttttaactcagctgtcactgaagtggctgtggggagggagtgtgcctgtcattccttgcagtgaatctggcgagggtcataagccccagagatgaagccatgggaaagatcactggttcattttttaccatcaacttattagcgttcagggagtgacttcagctcaagtattacaaatatgctctaattatactcaatgagctatatatcattacagattgctgatagccctttgtgggacattttataaagttcagactacatatttttagcaatgtggagatttaaaagtaaaaatataagagatattgtatatgccctgaggcatattttgtcttaaatattatccttggccaagtatactatataaatacagtaaatatgaatagaactggccaggtgccaatctcctaggatgaattttagtcaagaatgtatttatgggatataaataatactgtgtcaacatttaaagaaggggtctgattagttttgaatttattcatattgatcttttcacgtgctgttagtttaagactcgaagtggagttatgctaaggtttaccgatagtttgcccactgggaattagtggacctctagtagtttaacaatccatttgaagttcgaggcacatctattcgaaagatgctgcacaaggttttagaaacttagaaagggtgattcagttatacacaggaagaattcaaataattgacatgtaagaatctgtagagagtccgacaatcaaaaagaggaagagacacaacgtttcattttctttcttttctctccctttttcattgtaaccaatcagcacatgttgtggttctaaccctggtgattttgtactccccccaacacccgcacccctactcccactggaacgtttggcaatgtccagagacactttgggttgtcatgactggaggtggaggggtgctaccggtatttagtgggtcagccagggatgtttctaaccatcctataatgcatagggcaaccccccattcccaacatcaaagaattatcctgaccacaatgtcagtaatgcctctgttgaggagccctggtatttgttgggggttactgaattctgttaacagtaccatttagaaaataataacaaaaataaaatatctttatgatcaaagcatattcaaatgagaatactgaataggaggatagtcagacagttatcttaattaaatggagtgtggattagaccattgtatacagtatgtactttattttttgtggtcttaaagcccctaaattagagacatcaaaacttcccatttatttagcttaagtgatggtgttgacctatccattactagcttcagtcagcagcagtgtgatgttagaacagagaaaaaagaagtgaggaattatcatggattccccttgcaagggaaataagcagtttgtgttaacaaagagtggaatctccaagctaggcaatggaagaaagtaaataatcatcttgatttattctaccattttgaagtagatacactaaaaatatacagcctgaaaaatcacaatgagattccctttgtagttgtttcacatgagtgttaaacatttaacatgaagcaatctccttttctatttcctctgtaattttccaagttaaattgtggaatgtagaatgaataccaatgacactatggttttggggaatgtgacttagcattcaattcatgaatatgtctttctatatacaagttgctggtctgttggccacttgcccaatgaaggaaaatgttagcgattgctggaacgtagtggtatttttgctttatgtagtaagcatttttactattttattttttaggattctctatgtgtgtgtttgcatgtgggtgtatgagatagaaacagaaagaaaaagagagcgtatcaaagacagacttgaacttcttgacttccagaatgattgagttattaatatacaacagaccaaactttaattctcccttttttattgcatcgttgcttgtactaactctagtgtctaattgtggttacatttaagttaggtcacatgctcctccttcaggatttcctcttttttttacttttcaaagactagaaaaacctctcaaagaagtatactatttataacgaaagcagttgggtcgtctttgttgccaagtgaggccagccagctttatgcctctcctgaggagaccccacccgatgaaagaggggctttgcagaggttgaggggcaggtggggacctctccacctcacagaaggaaggggttgggggagcccactgcgtctccacagcaacccctgtggtctactcgaggagttgcactttttgaatgatttctccctggtgaaaagatggtgatgtaacctagtcgcagcatctttcatataaagatatgaaagaatgacagatcgtttttcctagaggaaactgagatgtgaaaaaagggctaatgactcactgttgaacccacatcaaatctgggttagaaccaaggagttcactgacttgtaggccttcgcccagagattacaacacactttaggctgcatatttagaaggttcgagaaattagagtggaggctcctggccctgggagaggtgtgcagggtcaccactggagtgggactctggcccactgccactccagcccgcctccccctgccccttgcccacagcacccccaccccaccccgccccattataggttcaggagtaaggtgagcagccgagcaagagactgcatggaagagctctggaaatagccccttccgctatcttgatgtagcatttccggtactgatgggctcccggagagaggatttggatttgccagatgtgcttgctctatttaggcagcgcttctgctcaagggtggattccattttgcagattctgcacagcttgatgaaatgtggctctgcccgagataaacaaatgcccattgtcattttgaaggcatatgtgtgctttcattttaaaaaatatcctttaaacaatgatagtttttaacctgggaattcaacgttctccaggtattttattttagatttaataatatgttaggggattctttgatgggtttgtttagactgaaaagtttgcttctgtcatttgtttggaataaatttgcatcatgctacaaccacaagctgcttttgatggttggctgttttgtttcttttctaagcgctgatatccagaagtgggtgtttaagtgccccacactctcaccactaccttacttcctgaattggcttggtggtcttgactctgaatgaaactgccccttggcctcttccctaccatctctaaattgccttcttttccttcattgtgatggaatgtctgcatggatggatggtcgagtgctcacatatcatgtcccatttgatactctactgagtttgtgggagacagcaccccctttacttaaccaggcctcagtttcttcccttgtaaagatgaagaaagtaacactggccttctagggttgtaaggattgatgatgacatatgtgaagaagcacctagtgcagctgctctggcatggagtaggtcttctttgcctggcagcaattctctgagtctcaaatgcctttgacttcagggtataccattattttatgtgccactaagaaaaaaatatcacttcagtgatcatgccattgattttaagagagggtctggattttagggagatgaaaatgtgattatgagcgataccccaggaaccacttccattaacctcggatgtcttggaacctccagctcattcttttcctttgcgatagttccactcagtggatctctttcctttgctcactcagtttgttccttaggtggcctctgacacttcagggcagggatgggatggggctggaaacagagaacatagggttggtaattcaccatgtctggcactatccagttctcctatgagaaggcctgagagtttaggcaattagattcaggcctttcagggtctggtccctcctccttgctcagcccctcctctcactaaatccctgcatgaaaactatactccagtcacattgtcctctttgcctttacccaaatgggccatttattttcatgcctctggggtctttgtttatgctgtttcttctacatagagatctatcttttcacacctttaaaaatccttctgcctggtgtggtggcccacgcctataatcttagcactttaggaagctgaggcgggaggatcacttgagggcaggagttgaagaccagcctgggcaacatagcaagatcttgtctctacagagaatttagttgggcctggtggtatgtgcctgtagtcctagctacttgggcggctgaagcaggaggattgcttgagcctaggagtttgaggctgcagtgagctatgactgccccgctgtcctccagcctgggcaacagagcgtgaccctgtctctaaacataacaaaataaaacaaaatatttctgggcttagtcagatgccacctccttagaaaaccttccttgattgtcctagtcttatttaattagctcttcctttgcactcttactatactgatggttatctctatctctccctcttttcttttgatcttagtaagatctaactctgttctgggctgtcttcttcattggtttgtagactgccccaggaacagaaatcaagtctaacttatctatattcttatagaacttagcatattgtgtttgatcaaggaatgtttgacaaatggatgagcattccctttacagaatgagattgaactacaggaagaagaagaatctgtgagttcaaagaggtgtcagggccaggagatgcggagagatgaaatgttctgaccttcattatcagggaaaatgtgtctgatgggtcatgtcactatgctaaagagcacagggattctcataaccataatattttctgtttccaattctcagataataatgaaggtggtgataatgatgattaaagctaacctttattgaggactttttacaggccaagcatagctaacctttattgaagacttataaaccaagcatagttttaaatattttacatatatgtactctttaatactcacaagcaatcctatgaggttaatactcatactgtccctttgacagctgaggaaatggaaatagctatttctattagtgatgtgttatggaaattagactttcagccaccacaggtaataggagccctaatacagagcccaggaaatagagagcatgacctttcttgccttcttgataaatgatgtaatacatccatggaagaatggtggctctcctctgttaacaagaattacattcacaagcactgagaaaatatacctctgaagcacacaacctgggtttttttttcttgcctcttaacacattcaacttttatttctgcacttaattgatacaaaaagtgtgatttattaagactttggttgtttctgtttgtttgtttgtgagacagagccttgctctgttgtccaggctggagtgcagtggcaccatctcagcttactgcaacctctggctcccgggtccaagcaattctcctgcctcagcctcccaactagctgggattacaagcatgtgccaccacgcccagctaatttttgtgtttttagtcaagatggggtttcaccatgttggtcaggctggtctcgaactgatctcaagtgatccatccgcctcggtctcccaaagtgctgggattataggcccgagccaccgtgcccagccttggttttgtttttgaactgcaatcattttcctcacaaaaattttgataaattttattgatagggcattcctatttcagagaattaatttatttgggaaggcaagatgatatacaatgagcatgatgactttggagctggacagacccattaaataaagaaaggagaataaataaaagggaattgtaccaaaggaatctcaaaggctgaaatggaagcggtaacatcaaagacaagaaatcctactccaggcctgtggcagttgttaaagagtggtcctgttttggttagcaacttggctctctcagtgcaagtcattaaaactgcctcattgatatttaagttgcttcctaccgaattcagatcttggctctgccactgtcggctttgcagctggatttgaaaccccttcacttagcccagcctcagtttcttcatttgtaaagaagaacatcgactttctaggggttgtaaaggatgatgtgtgtgaaaaagcacctggtgcagctgcttctggccttctttccacagcagctattattcatcgaatctcattgactttaaaatgcaccactattttatgtgccactaacaaagaaatatcactgcccatttaactattagttataacattaactaaatgtcactgccaattaactcagccattgattataagagagaatctggattttagaaataatagaatatgaaaaatatatagaatcagtgaaatcacataaaggtttgtgaaataaagaatagcggtctatgtgcacatggtatagagtgctatagcagaagtacatggaaaatgaaattaagtggaggcatgacatctgccctcagaaacgttttctagttaatgaatgttaggagcccatctgtggaatcaagaacaggagatccacatagtatatactcctcccagccagagtcttggaaatcaaaatttttttgtttttattttatttttgacatctcaagatttaccatttgtttcaaagggtatataaatttttaggggaattttttttttttcgagacagtctcactctgttgcccaggctggagtaagtggcacagacatggctcactgaagcctccatctcctgggctctagttatcctcctgcctcagcctctacaatagttgggaccacaggcatgcaccaccatgcctggctaattttttcaatttttttgtagagctggggtcttgtcatgttgttcaagctggtcttgaactcttggcctgaagcaatcctcctgcctctgccttctaaagtgctgggatcacagatgtgagccaccgcacccagccgggaaaaattatttaaactatttgaactgatctctgaaggttcatatgtgtcacatagtacttgcctctttatttttctggatcccaaagtccaaaatcaaagaacagaggggatgttgcctataaaagactgacatgcaggcggggcttctatgtaatgtgcttctggggctggtttcgcttctcctcacaggtgtcctgtctctcatcacttccactggttgaaaagaaaccaggacatttggagtcaaggctgaggcaggtcaggcagctgtggttatactcatgtagacctcatctcacctccgcaaccaagcactggccacagccgcctcttagccttcaggcaattcattttaaaggcggctttagcaatagtatgacattacggtgtagaaatctaaaagaggaggccgggtgcagtggctggcgcctgtaatcccagcactttgggaggctgaggcgggtggatcacctggggtcaggagtttgaaactagcctggccaatatggtgaaaccctgtctctacttaaaatacaaaaattagccgggcatggtggtaggcgcctgtaatcccagctacttgggaggctgaggcaggagaattgctcgaacccgggaggcagaggttgcagtgagccgagattgcgccactgcactccagcctgggagacaagagcaagacttcatctgaaaaatgaaaaaaaaaaaaaaagaaatctcaaagaggaagctggatgagatgaaggggaggggctggtcgagagtaactgcagagggtttgaggagtagaaatgatatcagagaggggaagccacactaaggccttgggtagttgttcacagtgcaacatattctctcagtgagttagcatcctggctttcctggggcaacccagtaacaccacttcagtgatgtggaaaaacattgctgtccaagaggaattgaattcactggctttagtgtctgttaggagggaaagcctcatcgtgctgagaaagcggtcctccctgggccgggaccatcccttcattctctcaaatgaacgcttggatttgttactgcctgataagtcagaaatgtttggcttagatgttccctcaaccacaatgacttgaggaacttaaggcaaatggaaaatgcttcctggatattgtaaagtccaaaccttctggaaatagtttgaatgcatttccatccctccacaggcagctgtttttctctcacactagcatgttccactagcgtgtccccgtccctcaggccttccaagctatctatatgtcggtaattatgaaacaggttatttctgaagaagagacgctgcgtttctgaagaaaaagtcatggagtagctatttaagaataacactggtcttttggagttgttgtttcaggaagtactgtagtatctttttggtcttctgaaagaaaaagaaaaacgttgtgactgtgactttggctctgtttattttacttttcttatctaacccacacgacactgacaaataccacatctgtcttgacaagctagtttgcaaataactattcattcataattttaggctattgtaagaatccttatttgttacttcatcttgtaagcaagaatgcaaaatttggttttgagaaagacactgaaatgaccgcaagtccactggtctttgcaaatctctccatctgaaaaagatgactgtgtactttttagtggattttcagagctctaaaatatttattgttgccaaaacatagatgggaattttctgagaaatataatttaattttaaagttttggattcatttcagtgttggtaatgtcagtgcttcttagaccaagtttatcagggatttttctgtttacaccagatgtagcagtaactttgtcatttcttctattttgatttttttaaaatatgatcatttattcccctatctattggcttaatctcattttcacttattttcacttttgctttgacatcttatggcaatatgactgcagttgtttctacttcctttatagtgaactcttttttttttttttttttgagacagagtctcgctccgtcacctaggctggagtgcagtggtgcgatttcagctcactgcaagctctgcctccggggttcatgccattcttctgcctcagcctcccgagtagctgggactacaggcaccccccaccatgcccagctaattttttttagtagagacggggtttcaccgtgttagccaggatggtctcagtctcctgacctcatgatctgcctgccttggcctcccaaagtgctgggattacagtcgtgagccaccgcacccagcagtgaactcttgtaataaaactgctggcttagaaactccagaaaagtgtgaatgacttattctgattctactttagacagataaagaaacaatcacagatggaggacttttctgtgcaaaggatgggtggtttggtcaaggaacggtccccccagaggtcagtcagggctttctgtggggaaaatgtttctacattcaagttcatccttggcattttgggctctgcaggttaacgagagggagacagaggaaggagtgcaccaaacctctgactcctacctggaagtagccaagcagaagcaaagctgaataatagccatgacctcaggctctgaagcaggaggttccaccttcagatggatctgttaaacttcaccaccctgggtttcttgtacctgtcttcactgttttctgtctgagatatcttgaggcatttttaaaacattaagttgttttggatagtaatttagtcactcatttgtatctcttcatagtattaagccttaggttattatgtgtgttaactaaaatcactgatcggatctctaaactaagtcctgaactgccatgattccacctactaaacttacacttttcttctacgtagaatgaggtgaccggtgctagtttgtcctggagagagaggtatttcagaagaattccactgtcagaaaatatcaccatcaataatgaaactatgtgtgtaaagtcatgtctaattttattaactgtttgtcacaagtactcagattatagaaagagggtcttgatctaagctgaccctgaattgttatacatttggatcagttttccctttcttgctgagaattctctaagaagagtagaaactcattgtagttcagtgttgggaggaatgattgtacccacttacagagttgctatatcacaagagagatgcattgtttgtttgtgtggagaggctggagggattagggcaggagcttatttgatagggagtttagttgtacatttgtaagacatctaattttacttaagatatcattgcagtaagaatggctttatctctatcctatagaccctcacagtagacaaaaccactacctactcagaacaaatagcccttatgagggaataatttttccttgattcacctgattggattgttttgaggtcaaatgaggttctgtaaaaggccttgctaacctgtaaggcataataacctgtaccagggttctcaaattttaccatgcaaaataattactgatgtacctttataaatgtagattcccaagcctttgtcagccactccaattcagattataattcagttcgttttaagatgggctccagaaacctgcatcttgataaggcggccaggtgatccttgtgcagatagttcagaaacatactctggaaacactgtgtatttttgttttgttgctttatttcttagctgtgtcattgcaggcaaaaataaaccccaacattgttacagttaattaacttcctagtcatttaattactttgtaaattacccatgcgaagttttaattctaggactgtttctattttatgacttgtgttacccatagtcccccatcataaattagtgagtgcctgcgttcttctaaaaatatcaggtttctcacatgcacgtagtgaggggaacaacacacactggggtctgtcagtggggatggggtagggagagcatcaggattcattgctaatgcatgcagggcttgatacctaggtgatggggttgataggtgcagcaaaccaccatggcacacgtttacctgtgtcacaaacctgcacatcctgcacatgtatcccggaacttaaaataaaataaaataaaatttaaaataaaaaaagttatgtttgtaagactataaatgcctcagattttgagaattctttacatttctttgttacaaagccttttcgcatatatccaaagcctcactgttctaaacagagtgtatccatacctcagtgctgcttcaatgatgtagatgattgaaaactgattttttttcctttttctgagacagagtctcactgtgtcacccaggctggagtgcagtggtgtgatctcagtttactgcaacctccgcctcctgggttcaagcgattcttctaccttagtctcctgagtaactgggactacaggcacgtggcaccacacccagttcatttttgtatttttagtagagacggagtttcaccatattggccaggctggtctcaaactcctgacctcgtggtctgcctgcctcggcctcccaaagtgttgggattataggcgtgagccaccgcgcccggcctgaaaactgattattttaaaactaaggtttgctttctgtagactgaacaatcattagcatccttacatctctatctcattcatggtcttaacttctaaggcattggatcagcaccagagctccctgtcctcctgccttacttaaaaacaaaaaagaaagaaaggaaagaaaagaagggattttaatgctgttttatagcagagtgaaagtaaaccaaaggtgcatacttgagaactgcaggctggaaattgcaagtgacaataattacctcatcttattcccacacagacttcctatgacctgggtgaccttgggatctgaattctgtttaatagaattgtccctcttctgcaccacggcgtacactggcctgaagaaggtgctgtttcccaggaaaagcacttaaatccccccaagaaatgcatagggccatagtttgaagaaaaagtattgctaaccaagtgacttactctgcatattctacctttctctggttgtattctttgagatttttatttaagataactttcagcatctctttttaaaggtcagatacgaatgagaaaactttgtctgacttgttaatcttgtgacaaaccgtttatatccagtgtagcttcctgtctttgctgactggttatttgagggaattttcttcctgtaagactgtggagaagcctctaaaaataaacagcatggtttcttattggtgggaacatatgtgagcagatgtcagctggaagcagcatatggtggcaacatgatagcagtatgtgcttatagaatccccgctgttgggtcttcgtcttccatgccacactggccagtcagagccccatatctcagttaaagagtgttccgcctagaaggtgtaatccacacatttgtgaaaaatctgccactgggatcttgatagtgggctgaatattggacatggtaagttccagagtatggaaaaagtctttgttatccatttaaaaatcaagtgataagaggcacacatatggcaaaaataaaaaataaatcaagagaagagtccacaaagcctttgtcttgtgttgaaagaagttttcaagtcaggtctgaatagtggcagtgttacttctagaagacgtgctctataaacatggaaggtgcatggactcccagtgtatgaaaggagccaggaaagaatgatattcatgccaggccctaataggcagtcagggcttcttttgtcacacaagttagacaactgctcatattccttgaccaccttttgtctgtcagtctgttttaaatatatcatctcatttcaattttataaaaaccctcagaggcagggttacgtctgcctcatcttacagacttctccatggattcacaggaaatcagtgacagaacaggggtttgaattaacatcttcttctgcaaaaattctatatttttattgaccttaccaccaatggaaaaagttttgaacactcagcaatatttcctcttcaatttgagatattttgtgggggagggggtgtgctttcttttctaagaatatggtgggcaaaatacaaattgggttgctgttactttaaagaaagtgaagttcaaattttccagatgtaataactattgtggaagatgcgtttagtccatttcagagagctctagctttttaaactgtaggtaagtagccccaaaccaatattcacttgtatttttgactcattcaagaaggagttttcacatgcgggttagaaatgatgacaggtggttttaagaacactgaaatctaggccagccaaatgaaaaccaaagttttattcttaatcggtagactgtcttttgtcaaaggaggtcaaagcctttcttattcatctttaatataaatcaaggtatttattttaccgtttcagtatgtaaattgtactctgttattttaacattagaacgtgctaaagggaaaactgaattcaggagtctgactgctggttaagggatgccagaagatctgggactaaaatctggaatcctccttagatcctcagtgtctaatcccctggccccaggtagcagggaccttatttctggggaaatgataagaacattcaatgagtccctcttctactttgaatctttgtatagttctgtgccaggcatctcttcagtaaaatagctaatgactgtgctttttaaaactcctagctgtctgcccagttgttacaacaccctctggctcagtgggcagcttgtgctccagacagtcccaggtgctctgtgggtaccttggtgagtacacttgtctgctttattcctcgtttgacatagttatatcaaatccatctttagtgtttgtctcctgtggggaacttgccagaggcaagatgagattctgaaatgcagccttgtacctgagcgatcacaaaggtgcctagaattttttttagtaagagtttacatgagaaaaactgatgaatagctttgaagtaatgcaatgactatattgcagcatgtaaaagaatgacttgtggggatgagatatgtgttttaggggtcacagagtgatttgacatacacctttcctgatccccatggaggccactctctggagggttggacagcatggcctgaatgtcaagggaatgttcctttttatatctttatttgtatctatgttcttgttcttgacacatagtagttgctcaattaatgtttcttgtcctgaaccaaagtgaaaggagattttctctcctttaaggttctagagcaagcttgtccaaccctcggcctgcatgcagtccaggatggccttgaatgcggcccaatgtaaatttgtaaattttcttaaaaaattatgagatttttttttgcaatatttttaaagcttatcagctatcgttagtgttagtctattttatgtgtggcccaagacaattcttgtttttccagtgaggcccagggaagctgaaagattggacgcccctgctctagagggagacctgtcggggagttatgctgctgattatttgtgacctttgtattgacatgtctcgtttgcttaaggaaatggatcgtcatgggtcaggccctcagccaactggacctgtgagcttgccacttgctcaaaccacttagccctgaccctcggagcaggtgcaagctcctcagagccagcaccaggtgttaggctgaggggtacaaaagccagaagtcctcaaccctttcttattgggaacactgattaattcagccatttattgaatgcttactatatgctggacgatgagtccacaacaaagaatagagcttgggtgatcctgacgctcaaggaattcagtggctaaagttatccctgaaccatgctcaggaaaaaaggaaacagacttgcaatcctggcattggttcactgcatatttttgaggccctgagaaggtttggattatgttgattctaagtgtgggtggaggtcccggctagagacaaaagaaatgtttttattatcctaggaaaagcctaggtcactggataccctattctgcaatgtatcatgcctacacattgttggttagaaatcagtatagtttatttacagtggcctaagctggggtttcctcaaaaagaactcattctgttgagaatatacgttgattttagtacagagagcctcaaagtggctacaagctgcaatgtgaataaaaagagtgaaaagtttaatcatgcctttaaagctcccgtttgtgagtcattacgttttgtttttatactctaaattctaattttatttcactagctcaaccaaggagttaaacatctgattttttccccctagctaactggctatttggaaaggaaaacgggagggaatgagagaaagaaaacatttgttgaataccccctatgtccctggtacttaagacacatcatcctaattttccccacattggttggtcagggagggccagaatgacgatccccattttttaggaaatcgtggtttggagaggtaaacaccttgtccttggtcacagagctggctggtgacagagccaaaatctgaattcaggtctggcccagatgccaccataccacagagaccccaaacttttccccccttttttggcttttcctttggaatcctgtcctgttaattttgtaactttcttgcctactacttgggattaatttccttttcatcttttcctcccatagtaaacaaagtgagaggcctaccctggttcttcgggcggtttttcttctcagacactcctcacttggggttattttcggtcacttaattgctgcgagcttctgtcttcctttggtgaaaaagcattggaaacccaccctgctcctcagcgagtcagggaaaatcaggagtgtctgagggtgtggaaggggagatggggcgcaagctccacatagattcccataacagtgggaggctcttccaccttgcctagctcgcaggctctggaaaaaccctgcagacccctttcagaccttccctgcaaggctgctgagcagtggggctctgcatttttttttttttttgtctctgttcttagaaatagtaattgagtaaaaatgtaagtgagtgtatgccagggggcaggcatccagggtcagggtgaatttctccatgctgagtgtgattctgaacactcgttaagtgaagttggcctgtgccaagcagctccagggccatccctgtcaccttgcgtgaaccgcctctccattccaaggagatgttgggagcggctgaagtgagcgtgaggcctgtggcgcctcttgcttttctcactctaacctgggtgttgttgataacgacgtgttctgacactgacaattggactggcagctctgatgctgcatcagctttaaattaaataccctggaggagaaaatagtccatgctcctcacagccatgtgactgcgaaatcatttttctcttttcaagcttattatccccaataatattggttaagatgtggttagcctgcctaaaggttttcctattaagacataagaatccagtgtgtaagcagtagagataagtctctctatgaaggaatggattaatagtcatgaaggcaaatataattttttaaaaagagtatttactgaataagaggcttttaagtaacttggttaagatttaaaggtggtatttctctctctctctctttttttagagacagagacaaggtctctctgttgtccaggctggagtgtggtagcatgatcatagctcactgtaacctctaactcctgggctgaagcaatcctcccaccccagcctcctgagtagctaggaccacaagtgtgcaccaccacactggctaattaaaaaaaaaatttttttttagagatggggtcttgctatattgcccaggctgggctcaaacttctgacctcacacagtcctcctgcctcagccttctgaagtgcagcgattataagacatgagccactgcgcctgacccgaggtggtgtttctcaaagtgtgatatgcatttctgtctcctgggacatccatcagatttcttggccccatttcagagctgccaagtcagaatcactggggtgggtggagctgaggactctgcacattttaaacaggcactgcaggtgcttctgacgtcactaaagtttgcagctgctcaagtcaaaggatgctctgattatgcacatctgtttactcagtcataccacatggatggattcagatccagtggactctctgtttgatcagctggtccttcaagtgtgaccctgaacctacagcccctgtggagtttttgccacgtgctttccattttcccaaatgcaggcaaatattgaggtagtttttaataatattacttgttattaagagtaccacacataccctctgctcactgttcatcacagaggagaacaatgagtgtgcaaggaagtaaattaatcgtgtgtgggtgttggatgttatgtatttctgcactcagatgccttcaaccgggcaacggtggagtggggaagggactttcaaagctagtgtttaatgcataagtgacacataccatgtataaggtaatatgtaattccctgaggtagcatttggccaaagcgctgctgacctcttggtggcctgaatcgtgttctgagacattccatggggtaaggacctagcaaacaatggaatgtaaactttactatctcagccaaactcagctttgggtaactgcaggtttctctttccaaacagtgttttgttcaaccagaggcattagagcaggcaagaatctgaccaacctattaagaagcaaagttaatgataaatcacttggtattttctttgtgcaaccctgtgccccctggtattctgatgtttttgaaccacctaatactttgaagacaactgtacagtatggatattctataactaccgtagattttttggctattgaactatttacagaaatacccagttctcgtatgtggtctacatcactaaataatctgattgaagtgtgagaagaatgacttgatagtgttcattttacctccgcataagtcttcagttaaaagagctgtacattaactgcaaatacagatataattttaagataaatgtcaaatgcatgtagagacctttggaagagaaaggtgaagagaggacgttcattttttttcttcttcttctttttgagatggagtctcgctcctcgctctgtcaccaggctagaaggcagtggtccatctcagcttactgcaacctccgcctcccaggttcaagcaattctcctgcctcagcctcctgagtagctgggactacagccgcacgccgccactcccagctaatttttgtatttttagtagcgacagggtctcaccatcttggcaagtatggtctcgatctcttgacctcgtgatccgcctgcctcagcctcccaaagtgctggaatcacaggcatgagccaccgtgcccggctgaagagaggacattcttatgatatattagttcattcagctgtatttattttattttattttgagacggagtttcactcttgttgcccaggctggagtacagcagcgtgatctcggctcactgcgacctccaccacccgggttcaagcaattctcctgcctgaatctcccgagtagctgggattacaggcacacaccaccacacctggctaatttttagtagagacggggtttcaccatgttggccccactggtctcgaactcctaaactcaggtgatccacccaccttggcatcccaaaatgctgggattacaggcatgagccaccgtgcccggcctattcagctgtgtttattgagtatttacttgtatcaggcagcagtctagctgctagtgaattgaatagcaaaaatccttgcccatggggagcttacattctggtggcataggatagataatcaataataaagatgaaataagaatttagaattggataaatgttttgcaggggaagtagagattggtcacagggatgaggatgtgaggtgtaattttatataagctgggcatggatgaatttgttaagaagggagtgcatgtaagcagacacttgaaggatgttagagagtaatctgggactacctggggaagggcattctattctgttccattctggcagagggaatagctggttctgttgtgacatgttcaaggattgtcaaaagtatcctagggatgagattagagagataatgagggataagtgatgtggggccttgtaggccatcatcaagtctgtggcttttcctctgactaaaacggagagaagagtggttttagccagagggccgtgtagctgttaagaatggtatgttgggccgggcacggtggctcatgtctgtaatcccaccactttgggaggccgaggcgggtggatcacaaggtcaagagatcgagaccatcctggccaacatggtgaaaccctgtctctactaaaaatacaaaaattagctgggcatggtggcatgcatctgtagtcccagctactcaggaggctgagacaggagaatcacttcaaccccggaggtggaggttgcagtaagccgagatcgtgcctcttcactccagcctgggcaacaaagcaagattccgtctcagaaaaaaaaaaaaaaaaaaaaaaaaaaaaaaaaaaaaatggtatgttgaatggccaaggtggaagtaggaaattcagtgaggaggtcttcgtgatgcatcaggatggcacttggcaactgcatttctatagcaagaatctcaaacagacctgccttatgctgagtttttcctttagcaaacagtttgataggcaggctacagtgggttttgtatttagaaaatgtttttctgtttgatggtttttagttaatagtccttagttattggcaactcacccccttcctttctgaggagcagccagttctgcagccttctgtgtgtgaaaataaccccttgggtctcccatcttgtgctcacgcatgtggaatggcagctactggagttcgtactcgcggtgaagcctagtcatggccgtctttgacatgatggccagggacatgtggcactatacccatagctgaccatactttggcctaggagaatgtcaaactgccttttccggtgtgaaatagaaagtcaagcttggaaggatccttctttggatctgtccagctgtgctctgcatgcaatagaagggcttttgcctaaactttgaaatgaggtcataagccagagaatttgtaaaactatgtctcttatcagtcaaaaagaatttctgtgggactgaagtttgctttctaattcttaagctttgaacaggaagactttacacggggatgttggtgttatttcttcatccatctgtacaagaaacatgagttgagcctactgtgtgccaggtgataggtgtaagaaaactgcatagatcctgtcctcagggagcctgcacttagtgaggaagtcaggcagactaaaccaaccaaacagaaacaaaaagccaaccctgtggttgatgacaaggaaagcatctgagaggccagaaaaagaattgtacaacttggcctagtggtgaaggaagccttactgggggagatgatatttacctcttgaaagatggcctttgagattgtagtttggtagtcatcaagcagcaatagaaaactgcttatgttttctggaaggagatttgccccttcatgtaatttctttctctgtgagtttgcatgactactgtcttaatgagtcatgaaacaccaagaaatgcttagtgtggtctttgaaaaaattgatgtatttttacaagggaacaactttgaaatactgagactagagaataggacaatatggttacatcaagtatttgttattcaaagttgatatattcagaagacataatgggcctattgtatataaacatccatgtgatgatatagtatactgggactctggaatttggcattattttataagctcagggtcactgtctagagcttttctctcaatctcagtgagtgataaacagcacaggtttctcgcacgttcatatagatggccttgtgggatggctgtggctctgttccatgagctctttattccaggaccagggcttagggagcagcccctaacccaggcatgctgacctcatggcagaaccaggagatgtggcagttgtctttacccacattccattagccaaagcaggtcacatggccacacatgatttcagtagagtaggaattgggtacaagggagagaggctgtggggatgggcccaggggagagggacagccagcattttgaacaaatgatacagtctaccacagtgtaggtggaggagttggggaacagggaaaggtttcgcccactttaaaaaaactttctggctgggcgcagtggctcgtgcctgtaatcccagctctttggaaggcccggtgggaggatcacttgagcccaggagtttgagacaagcctgggcaacatggtgaaaccccatctttacaaaaaatacaaaaaatagccgggcctaatgtggcacgtgcctgtggtcccagctattcaggaggctgaggtgggagggtcacttgatcccgggagttggaaggtgcagtgagccgagatcgcactactgcactccagcctgggcgatagaggggagaccctgtctcaatcaatcaataaataaataaaaatttaaaaacagaaaagaaaaactttctgttttgtggatatgacatgattggatccacactattgctgtgtctgtgggaatatggggcactttattgaaatatgaatatttactgcatatttggttggttttataagacatgcatcatgttatttccctccattttcattaatgccattctcctccaatcaagatgagtttatctattttaaaaggccctgttggcagtaccaggtttctaaagcaagtcctgatacgttatatggagtttatgtatgtccggcagactctgaaactcaggcttacctccaaagcatgcagtgatatctttgagccttaggtcctagattgtcactctggtcctgatatgtctggcagtgtctgatagatgttgtccacaataagaattcaggcgagtttccatgaggttctgtagatgtttagctgtttgccagaaggagcatggctttcctgtttcttatctgtcttgtgcgagttccatgccatcttaaacagtgtgtaccatgtagttccctagaaccccatctataacttgaaccttagtctcttgagaatgacccaccagggtgattgtttagagccacgttcctacctgttgtttccggtgagcaaactggaaagtaaccctgcctggcatggggtgtctgctgtgtaaccctcaacacagtgacagtgatctgctctgaccgtccctgagcgtgctaggtagctcagggcttgcaagttcataaataattatctccacagcctattcttagtagcaacagatgctgagcttttccagcctgctctcggggtcagtggtgggaaagagaagaaaaaaaatgaaagcattgttttgcacatggctggacatctgtatttctgaattgccctgttgtgtgtatgatgcaactgctggagctgttttgctgaatgtgaactttgtcaaccgactggagtctaaattggttttggatccctctgaaatctaaatggtcagaccatatttttctaatattcagctggattgtatctttgctctgaagtggagctgacttcgtatgtgttcacagtggcagcaggggttgcttctctgttttcctggtctgtgttgtttgttttcccaagactgctgcttaccttgtccattgtctatactcaggagaccaggaaggtaactccctatggaactgtggccactgggacttcaaggatcgttaactctagtgttattgttaggaagagagcagactgtttttcagaaatgaaacaggtgaagcaccaagaatagctaacctactaggtgcactggtaccatggcaaagacttggacttggacttgggatatccaagcacttaggttctttgttgggagctttgacagtcaaggctgatgtttctgtttggtagctgtagtgcagaggttctcaacttcactatgtatcagaatcacctggggagcacttaacatattacttatattactcaggccagagtccaactccagaaattctgactccgttggtctggagtgggactttgcatctttagttttagaaagtttcccggctgggcacggtggctcacgcctgtaatcccagcactttgggagactgaggtgggcggatcacctgaggtcaggagttcaagaccagcctgatcaccatggacaaaccccatctctactaaaaatacaaaaaattagctaggagtggtggcacatgcctgtaatcccagctactcgggaggctgaggtaggagaatcgcttgaatctgggaggcggaggttgtggtgagctgagatcgcgccactgcactccaccctgggcaaaaagagcaaagctccgtctcaaaaaaaagtttcccaggagattctaatgtgcaactggagttgagaacctgtattttggaggcttacaaagcttttaataaaactgtgtggctgtgtctagatatccatgttaggttttgagtgaatttctgcatgaagaaaagacatctatttgggtggtgatgttgatggttggggcagtggatcctgtcttttataacaatatgattagtaataataatatgactaatatgattagtaatatgattagtaataatatgactaatatgattagtaatatgattagttataatatgattatattactaatcatattgttaataatactaactatcagttatggaatagttatattaggctctgggctaatctccatattagcactatatataaacactattattattctaaattttataaataaggaaactgaggtgtagtaacatcacgtgtaatttcctcacgatcacacagctgtctgactccaaagctcatcctattcatcactcctccaagatgattaatttccatttaaataaggaaaatgtggattaaagaatgagaagtctaaaaaggagaatcctctgagtgagaaccatatgcatctgtatgtgtcagggcatcattctcttctgataaaaggaaaaaaaagacaagtctggatgtgtttctttttttctcttaaatgcagtatttttttcctaagaacctgtgaaagttcaaggcaggcagtagaacccaagggcttgcatactggtattggaattaagcagtggcctctgagcttagctcatgcatgctcttcatgttcctcattagaagaatgaaaatagcttcttatgtgaatctatatggaggatgagtgtgtgcttacagttattttcttgtctaggctgggtaataattagagtgggcaatataaactccagtgttttcattttgttccctgaataggacaactgttttgttgttgcttttgttgttggcagatttgtaaatcagagtacatacttcttacttaaaggactgtgttaattctctaatgcctgttaaaagattagaatagtaccagcacctatcaataagcaggatcctggaaattccatagccagttcctgataggccccatacttatgaaggaatgttacattgaggcatccaataaatatttattaaatgagagagtgaatgaatttttgcacatatgtaccataacagaaatagcaccccacgtattgctaaggacttcttgggaaaggagagtgattttagtcaattgctatgctcccagtttctccacggggcccccgtggtctgctgaccaactcctaattgcctaccagaagcagttctctgtacactaaacatagcaatattagtaggcttttaaaaaatcttatcatcacaagcttccgtttatatctctcagccttgatgaaaggaagctgacttttgctttactctaagtagcattcttcatattacaagttagaaaaagttctgttgtccccagggcacataaggaacaggagagaagttgcttgccagcccatgtgaaagatgagaagcccaacttggattcattcatgtcccctgctacagggacacctggatgagaccctgctccctctgtgagttcaaactgctgtcactggagttataaagggacatttaggcttgtgttcttgggtctgtagccagacagcacaagtatttttagggctctttttgtctcaatctgatttctgcttgaaactttaacacatgcaggcttcactgaaatacttttaaactactctctgggcagtgtaggaggggttggattagtactacagcctttaaacagttcaaaaaaagatttttttttattgctaaatatccaacaggctgaacggaggaaattcaagtctaaccctggagggacccctgtttagtcatctgtctagacagacgagttcatataatgggcctctatgtttcttttgctttgtataacagacggtggtcccttcctttaaactttgtgaagatgtcaacctttggttttttttatcccaacctgctgttgataagccaagaaagtgactcacacatgagccaacaataactcttgagtgtgacaattagtcttacaattgagtagcaagaaaatataggatttgcatacaggggacctgggtaaaatcctgactgtgtaacatcgagaaagtcagttaccctttctgaacttttttttttttcctaaaatgagagttaattaaaaaaaaaaaacccaacattatttcttaatggttcttcaaaagaagaaattatctaacacagaaaaatgtttttcacatggtagaggctgagtaaattgtcattcattcaatcaatcattttaaggtgatcattgaagactttagcatttttgctttcttattctgaaaaccatagaaaaactagaaattctagcccatattttaaatctcatgtcagcatacattgagaacagcgagtgcttttttttcagtctagaaaagaagaaaagtggtaccaatttctgtgagaggaagataatattggagatagtattttaaaatacgggatattgagggaggagggagagcatcaggaggaatagctaatggatgctggccttaatacctaggtgatgggatgatctgtgcaacaaaccaccatggcacgtttacctatgtaacaaaccttcacatcctgcatatgtacccctgaacttaagaagttgaagaaaaaatatgggatatctataatttatattcataagttgaatgtatagaatcaaagggaggattggtggttgccaggggctgtagcgaaggggaaatgaggagttactaataaatgggcctaaagtttcagttgagcaagatgaataagatctagagagctgctgcacaacgtcgtacccacagtcaacaataatagattgcacacttaaaaatgtggtaagtgcgtacatctcccgttaagtgttcttacacaatagaatttaaaatattgttagaagtgaataaggcagaatgacattctttatcttgttaggagggctggaagctcagaccttgcatgaaaggacaatgtgtgttagtaatgatttctacaaccaggcggaacatcagccacctcaattccttgtcatttcactttaagctctgcctggatggttcctgaaaaccatgacctacaaaattttgttttattctatttaattcagttataattcaccaagcatatactgccttaagaatttggtgcctgaattatgcagatgaataaaaaatgagataggtagggatgagtccctcttggaagaggcatcaccaacagctcagagagtactaggaccatacaacctaggtttaagtggaggccttactgtttccagttccatagcaccgggcaagttccctctttaagcctcagtttcttatcccccacctaagtgggatgaatccagatgtgtacctgacagctgatgtgctcccagtagctagtaacattgcttttgctgttatgcttattctttttattgttattactatattatccctgccctcaagtagcttatagcctatttgtggagacccatttgtacacactaccctgcacaaagcagaaaaattaaaaaactgctgaatgacatttacaagcaaagttcaatccaaacacataggaagatggttggttaatgaaaccagctttgtttgttttgagacacggtcttgctctgttgcccaggctggagtgcagtggtgtaatgatagctcactgcagccttgacctcctgggctcaagtgactctcccacctcagcctaggaggttagctgggactacagatgatgccaccacacctggctaatttaaaaaaaaaaatttttatagagatgaggtctcactttgttgcccgggctggtctcagactcctgggctcaagggatcctcctaaagtgctgggattacaggcgtgagccactgtgcccagctgaaaccaacttttaggagaagcagtccctaccatgcctagaacaacgtgtatttcttaagtgcttagccacagccttaaagtgaaagggaaatagaaaaatcagcctcctctttagctggtacaggacagaagcaaaacatagatatctatgttgatagcataacttttcacattttgtagtatagttcatgacattctcagacactgaaattccattggaacccagtgctttacgtggctttgaatatggtatgtgtgagtcatgtctctttcaatacaactgcaatcaataaaaaccccagtaaaatgtggttaaccacaagggcatccctccccaccagctccacccccaaatcagcactatgattcattcaatgtagtcctcctccccctaatgtattttacattgggagatacttatgcttcctcagcacaaaaatcagaaatcctactcttctgctggtcgcctgcccctatgttgtgccgtcttgccccacccccgacccctgggaagtccagtcgtggcctataccctgggtagctgtggctggggagaaactctgcccagtttcatgcagaagcaggacagatgcttccaaaggatgcagtctgaggtcccagaagaccttactgagaaaaaagtcttttcttctttcttactaatataaccccagcatccatcttcctgtgtcttccttaaattgaatcctgagatgaggcttcccatttgccaccacctccttcgttttaattcattacatatattatagtgtgtttgtttgtttgtttgtttgtttgtttgtttttgatacagagccttgctctgtttcccaggctggagtgcagtggtgccatcttggctcactgcaaccgccgcctcccgggttcaagcaattctcctgccttagtctcctgagtagctgggattacaggcccctgtcactatgcctggctaattttggatttatttatttatttatttatttatttatttatttatttaagatggagtcttgctctgtcgcaccaggcactctatgagtgcaatggtgcgatcttagctcactgcaacctccgcctcccgggttcatgtgattctcctgcctcagcctctcgagtagttgggattacaggcgcccgccactgcgcccaggtaatttttgcatttttagtagagacggggtttcgccatgttggccaggctggtttcgaagtcctgacctcaggtgatccgcccgcctcggcctcccaaagtgctgggattacaggcgtgagctactgcacccggccattttttgggtatttttagtagagacgaggtttcaccatgttggccaggctagtctcgaacttctgacctcaagtgctcctcccccctcggcctcccaaagtgctgggattatagatgtgagccaccgtgcccagcctgttcattttgctgttgagacagagtctcactctgccacccagtctggggtgcagggaccatagctcactgcagcctggaactcctggccccaaaggatccttccgcctcaacctcctagagcgctgggatcacaggggtgctacaccacacccggcctgttttttttttcttatacagaagggacctgaggaaacaatatgcattgtgagtgcacaccagagggatagagaaaggcagacaaggaaaggagaggaaaggcgggtaatggaagaagaggtgtggcaagggcagcagccttcacattgcttcctcgctgggtctgtggctattaccctcctgagcagcaccttctcaggccagctcggtctagaaagctgtctgccagcagattctagttgtcatcccagcagtccttaaaacatgacctgccacccacaagggaaatctggtctcattagtacctttaattataaaagcagaccgagaacacatggtacattttctttctttctttcttttttttttttcttttttagagacggagtctcactctgtcacccaggctggagtgcagtggtgcgatctcggctcactgcaagctccgcctcccgggttcacgccattctcctgcctcagcctcctgagtagctgggactacaggcgcccgccaccacacctggctaatttttttgtatttttagtagagacagggtttcaccgtggttcgccaggatggcctcgatctcctgacctcatgatccacccgccttggcctcccaaagtgctgggattacaggcgtgagccaccgtgcccggccagtaccttttctttattttttaattttatttctttttctttctttctttctttcttttttttttttttacttctgcgagcctggaacatcttttctttaatttgatgctgtctttcttcctctctaatgctcaaatctagctttcatattttttctcaaggttgtcatttgacaggaggttttatttaaaagttctgaggttaaatacctggaagataagatgaagccagttgaaaacagtgtcctttttctgttctcatgcctgagagaagttcagtcagtcctgatttttcaatcggggtagaccaaagtttaagtcagctggctgtgatacaatcttattttaccattttctttcacatgcttttagttaatggaggaagctgggtcttaaaatatccaattgcatttaacttcttttacttacttaaggaaccagttaccctttgataagtacctatgtctagttccttttatccacagttggtatttagtcaataataacaataacaacaataataataccgatgcggtgcttcatatactccaggcactcttctaaacacttttagagacatcgatattcatttgatcctggcaataataggtattattactctctttgtttcacatgtgaggaaaccaaggcagagagagattaaataacttgcccaagctgtgagatagtagagctgagacatttacctatcaaagtcgctgccatcgtcagcactcactcgcattcattggaagctcaagtcggtgaccaatcatgtgtccctaaagcagcagtacagtgtaatgattaagggcacaaactctggaatgaaaatggcctaggtttgtgtgtttggggacggacattccactctagaagtagattccacctggcctaaaatgtgtaaatcactgtgctatcacaccaagttagaaactcacatggtgcacacacatgctaagctccttacagtctgaaactggcaacagtaatcagcatgcaaagttctctttagatggcctgttttttttttcctagctaacccctttgattagcaaatagtacaaatgtttatagagttggaagatttttaatatctttatttgaattgcacaaagcagccaaatgtagtttggccctaggctgcagagtatatgtgtccgggtgccaagaagcaactgcactccgcctgggatgccaagcattccagacctgttaccttgtaagtgtaatatttaccagatttttgcttcatctggagatgaagagcagagatgaatagagtgggggtgggtcaggctgctgggaagggagctcagtgttgagaggaatccctgaatgagtaggtagctgggaagggaacagagatttgccagaaaaagcccttttgctggcaacttggaatctaggaaaaaataacagaggctaacatgctggggtgcttaccatgtgccaggcatagtgccaaatgttctgctttcatgagcctatctcatcctttcaattctatgagatagatgctattattatccctactttgtagatgggaaaagtgcagctgagagagttaattacccaagatcaattctcttctgttccaaggtctctttgttactttagtaaaactagtacagagcaaggaatgacagtgcatcaagccgaaccccaacaagtcaaggcacttacagtatcttctgttggttcttactttctctaaccttcgcaactgccctgaaagttaggtgttgttaacattttacagacgaggaaactgaggccttagagcttaagatatttgccaaaggcacatttttgtttttgtttttgtttttttttttttttgagacagagtctcgctctgttgcccaggctggattgaagtggcacagtcttggctcactgcaagctccgcctcccgggttcacgccattctcctgcctcagcctcctgagtaggtgggactacaggcaaccgccaccaagcccagctaatttttgtatttttagtagagacggggtttcaccttgttagccaggatggtctggatctcctgacctcgtgatccacccgcctcggcctcccaaagtgctgggagtacaggtgtgagccacagcgcccgactgaaaggccagatttttaagtggtaaatccaggagtagaatctgggtctgctgaatcccacatcttaaatctctttgtgttcaaacatgacgtcttcattaggcaccagtgacaagatcacaaataaaacaaaactctatctctggacaagctcaattttctgcgatgttcctaaaagggaaggggattgaggcagagctccaggtagcttgtactgaatcctgtgtgtgaataaacagaggtagtagatgagatagtgctactaggtgtgtgtgtaggggtgtgtgtgtgtgtgtgcacacgcgcgtgcctatgcacacaatggggcagttgtaggctggagcagggaagatttatttttaaattgaagaaattagtagttgccagagaagcacatgtgcaatgtcttatgttttactttcatcatctctccatctgatgaataaattttaaggggattcctgcaggtcagcagaaagagagggtgaaatctagccctagttctttgctgcccttaccagatggaggccaccattaaagccctcaactcaactgaaaaaaaaaattttatgaagtatttttgtgaaaattaagctatagcattggaaaccactctttacatccccctccccacctcctgcagtgctcaaagctgtcttccaaggaagctggaaatataagtagaaaaaatatcttgcccagaggcccctggcaagagctcttaatcagctactggtacctttgcttttggggactgtagctttggttgagtctcacccaaaaatcaatgtttttagctgaaggcggaaaattataaaagcaaaggtgtgaagtgaagctctttggttagtgctgtcagtggaagaacagtcaccccagtggagtaataggtgccccaagacacatacacacgcttgagcaggaccactgattcatccaggcgctcgctgatgtgagactgataaagtgacttatttttaagcagttgatcatacttctgaattaaagtattcatagattattcagaaataataaatttgttttgtggaaagtgagatttttttttctctacttacttcacagtaccaccatgtcccactggacatttggacacataggaactgaattcaagggatgattttctatcacttgaaatcttaaagtagaagagagatggagtgatttgcttgtgatgaatcggccagtctctgggtaaaaaagtcaggactaggaaaacaaggactaaagtcacaaacttctgctcccaacacaatcactaagatcaccttcaaatgccacttctacttcccgtaggagttctagtctttcatgagtattcaattttaagcactggtggtctatatggaggtatgaggtggtgtttctcttttggctactcatctcaaattttgaaaataaatgttcatgggggtaagaagattgttttatgacactagcctactgtaaattctttttggagtcttcttgaaaatatttgagtttttaaattaaacactaggtgataaggaaaggtttcaagggaggataaagttaaaaagaaaggcaattcccaacgaagaggaaagaaacctatgtgatggagtcttaagcttttgtattctgcccttggatattacagcaaggccctaggactggatttatgatgcaaccaggggtttaattagaagactatgagctcgaatggagccacatttagacagaatctgaaacctctgttttgtcaatgcataattctacaggaatttgcaagtgacctttatttttttaggagggtccaaaattcaaagctggaaagcatgtgtcctttttaatgtatagtctattgcaaatatgaatctgcctttagaaaaacacaagaccattttaaaatgcaataatagggctgctaatttgcccttcagaagtcatttttcattttctttgttgggaaagcaggtgcatgagaagtgtgtgtatgtggggggtgtgggggagagggagagtgtcctcaggtgttcattgtcacacagccctcaagtggcttcacaggcagaaagtcctagcaagaaatggcagtccttgcagaagccctttgtcccttcagccatactgtttgtgagtttttttactgaaggattttcacacagctacgtggcgaaggacttgcgagatttgattatatatcccatgagtcaggtttcgatgggttacagattgcaataaaatcaaccacaggctttggaaaaactttccatgaaaggcattttagactaagaaatattggctttggatttccccatctagaaaggtagagagtaaacatgtactgacaaaaaagcaccacattcgggatcccgaaaataattgtgaaacaacacaagaatgcttttcctcctccctttccttcctttccacgtcacagagtttgtcatttatgacgattttgtggttgttttaacagttctgtgaaaatgagatacagagaaagtatttttaagatttatttaaataatataaggtcacagatattcccccctctcctcttctagaacatcttgattcattaaaaagaaaaaaaaaaaggaattaaatagcataagtattttgaatgcattggttatgggttttatttttaataactgtcttgtcactcattattttattgggttaaaagttataatcattttcaggtagataattaaagtagctatgtatgtaggaatggagttagaataatttggaatatcgtggtggaaaaagcgttagcaggtatgtgggatatttgaaagccttagaaaaacaagcatgttaaatgcttcctatactattatgtgttataagacagattatgtataataagaggctatcttaccttttaaaataaagtactaaaagtggttcattacaagtcacttccgctctggctgtaccacttattagctgtgtgaccttagataaattatttaatcctcataagccttagtctcctcatctgcaaaatggaaatgaaaacagtatctacctcgcagagttcttgtgaggcttaaacgagataatccaggtcagacccagctgctgttattcttggccctgtacatattgagagaggctggctttccaggcagtggatttaacatacgtttgcttcatctcatttttccttaaactcaggggctatggacagtccattcacacccctagagtctcaccagaaaaggacagaaggcagaattcaaatctgctgagaatggatggttaacatgaaacgtgggggatgactcatggcaggaggaggttcagtgaagcccgattgtctctgacagttgaggacaaagtggctgcagatgcttcagaggctgcccccagagcacattgcagcctgtgcagttattattcctaaggccgatgccacaatgatgtcacataaccacccggcagatggctcgtattattatatgcattgaaaccagagtgaacccttcccatgtttgggatgggtgtggtgagtgggaggaacacctgttaggaggtaggatctgggtttgattctattttttccccctctcttactggtactttctggttggtagctctgagcctcagtttccttatctgcaaaagggagatgtacctcaaaagttgtttagaagggtagagtagaattagataagataatgtaagcaaatgcttggtgtttctgaatgacctctggaatatgtggacagcatattgttattcaatgataattaagaataagttgaagtacagtgatgccaccttgtacttatcattttgcatttaacaaaaggacgtggacatgcattatcgtatttgagcttgacgaaagcctgtgatcaccggttcacagagcacagaggttttgggccttccccaaagtaacacgacttcagaggaaaatgagaattcctgctaagaagtggccatccttggtgtataagcccctttatccctttagccatgatatttgggagattttttgctgaagggttttaacatgaccccatgtcaagactaagaccaagatcttctcacatagctgcagaggatcacacacagagggtgtctttggctggtgaggggctcatgagatggagcatagcaggggcctcctagtgtgtccttcaaaaccaaaattaggcttttcataagctcagtctctgaactcagtgctgtctggctcctttcccatctttccccttggaggaaaactgaagaattaagctgttagaactagacttctctaataagcctcagtgtcacaggttgtcacagttgttgcattttattttgtttttatttttattttttcttaattgggcagcctctcccccagccttttcccccaaaccagaataagttcagagagactcccatggttgcattttaaaggtcatctagttctgtcattactccttgaatcctgtcataagatcctggctactcgcagggatgttgcttgaaccttttgtaggtaactctgtttgaaggctcttcactgtactgagcttgggctgttctgagatttatcacccccaccccatcctttaagtactacagaacaaatctttatcaggagaggtggggacacgggacagtggaaagagtgtggacttgggatcagatagacttgatttgcaaatttccagctacctttctgtttcagctgtatactgttgcacaagtgacttgcctgctggaaacctcagtctcttcattcacacaatgagaatggtggggattggaaattatctagccaacctagtaggcactatcaataagatagcatttatatgagattgccagatgtcattaaaaatgagattatgtcgaagaaagccctttgtaagttgttttcaaatgtaggcactgctcctagaaaatcactggaagtctctttgtgtagctgatttatcaagtaatctaatgggccaacaaaactaatgactccaagaatggctttctaagatgtgtcctactgaatcaggctcaagcctgcccacaggttcctgatgctaatagttacaaactgaggagtagaggcagaccccagggccattctggtttgtttgattctggatggcagagaaagggagggcttccatccacaagctttttgatactgctcctgtcttgagatttgtgaccttttctatgttcctgcctagaaaagtcttattgacatcagattctgaaagtaggtgcaccctttcctctttggctgtcaatgttctgttaataatataagcttacgtttactgagtacttactatgttcatatttattaccttatttaatccttatggcaattcttagaggcaaatgctagtattatcatattttaaagatacagaaataaagtgagtccctgctcttttgctgttcccgtctatcaaggtgaacacctaaagaggccactataatacacagtatgataagtgccaggatgcaaagaatggagaaattcattgtgctctggaagagccagagacacttctaaaaagaggtgacactaggctggaccttcaaggatgaatagaatttgccaaatgtaaaggtttctaggtgaaagactgacatggcatgggtgtggtggtgcttggcatatttggagattggaagtgatgtggtgcacttaggggctggggcagagtccagtatggcaggggtgggaggggagtggaggggagacagcagggtgcccattaagctggaaagggagtttggggtcagaaggtacaaaaattgacatgccgtggagttgtctctttgggatatctgaaatgtatcaagactgtgcacttgttagaggttaagagagagaaaaggatggttaagaattgaagtaggcttgcttggtaccatgctgtctatgttcctggaaaaggcatgcccagctacagagggtagtgctttctcaccttgaacccagtaacctcaagggcaggtagtgtctctcctagccttggatggaagagtctcatccaagcccaattattcttttagacacgagggaaccgaggcctgggaagttgatgataccctatatgagatctacagagaaatcagttgtaccactaccttctcttaatgctcactcctgaaaagcccctcccatattgcacatcttaaatcccttcacagctcaagtggttactgtacaaggcctgttcccacctgacctttttgtttcttctgcccaaggcagacttgtgagaaaaggtggtctgattgaaggctgggaaattaggattgatgactctatgttgcctggctatgagacttacaaaatccttttaggattctgggatccttctctgagatatttgaaagggttcaccatgccatgaagttcatgtctttttctatgtccccccacccccactggcattattctacatggaaatgactgtgatctggaaggcccatagacagcaagaacacatctgtgtcctctgcaagaatagaagctatagttaaaggacctgtgcacccacagaggaatggacgtggaattaggcatagtatataattagagtagagctatggagaaggcacattttggctcctagagctccccagcttccttctgacaataaaaaaggggtaatgtgcagttagttgttttcaataaaaggaagcaaagggatcaactggagtttttaaaactctgtctgtgtttaggctgcaccgattgcctgtccaaggcagtctgacctgcgtcaggccatcctgagggaagagaggtcacagttggcccccccacatccagagggaaattttaaagttcagtaaactactgggcaattatggattgcttggcacaccaaaaagtgattttgtctttgaagctgatgctcagacaacatctctgagtctccgctgtgcccactgaggtggacccgtggccccctcgcccaccatgaaagaaagagcaggctgttctgaagacatctttattcctgctgaaacatgggggacctggtcctttccttgcttgtccctctctggatcttatccctaggtcattcccaaagtaccatttccaaagaaggtcaccgtatgtcgggagccgctgaatagctgatccctgagttggctgcctgaacactaataactttctccatcctggtcccttccagacattgtacactctaaggctgctgtgcgtttagaggaagatacttccgctctcagcactagtaataactattcacaatcataatgaagagaaaaatcgctcttgtcagagtatcagtgccagttgaaaaggcagcttgtttgttttaatgttgctgtatctcttcaagttggaatatgatggcggtctcagaattggccttctcagctgaatgtgcttgccctttagaaggcactctatacagggttcgttattccactggctgcttgatatcctacaggggagcctattcttgagctcgatgtcagaagatgagcgttggattagcactgagaagtctgggggagtcacttacatcgaatcatttggcctctgaattgtggttttctcaacagtaaaatgggggtaatcctaacctggcttacagggttatcaggctaggatgaaatagtatatgtggaggtgcttggtgaaacactatgaagacctaaaggattgggattaacattcatcattgttatgtgacttagctgtttgagagcgattaatttccttttgctttgtgatacatgttgaacacctattgtgtactaagagaccttgtcctgggcctggagctaggacacaggagtgggaagatgacagattcagtatctgtgcttgtgaaacttacaaaggcaccctcgcccgatagagaggctgttcttcctgtaccggtcccatatgcacctgctttcaagtaaagcagacctctgcctagccttcagtgatctctaatccagtgctacagtcagacagcagcacagcttgcttccggctgaagaacattctcaagtgtttaagatcactgaaaagaattgagaggagttatcaattttccctgatcaaaacccctctggccaatgaatgtactcagatagtatctcatgggtgctctgtggtacagtgtatatgggtgcttatcaactattcaaggaacatacgttctttattggtaacctttcaggcactacacacatagaagctgaattaaggtattcagatgcaattgtagaagtcactattttttcacttttctgacacaaggaaatttttcagacatgtctaacctttaagagtagattagtgaaaccaatgtaatatgtgagaaataaacatcttcagtgacatcactgaggcaccctgacatacgagaagtgattccactgactttaggatatacttgagtacacataggtaagccccatgcaggctttgtgtaaaattcccatctctatatcttcatttgctatttgttaatttttgttatatatgtaccactccactatggtgctctatttactttcaccctcacacatttataaaccactggctttaatcaagaaacacttctttaaagaggacttagtaaatgcttttcaggaagcacagaacagccattgacttggaactaactaaaagcatttgtcgtgcccccaccccggtctacacaaccactagtgagaaaagaaagcaggaaagctttgggaaccacctgagttttttttgcacctccattgcaaagacttcttgaatgttcctaaagaaaacagagagagctatatgacagatcttaagcttccccaaagaaaaaaaaaaacagcttatttttttcttaagaattctccttccattctcaaaacgactgtgctttccaataagttgggacccgctggattaactccttggagaccctagctgccatttttcagtcagttttttctcccagtgtcccgagagcaggttaaaattcaaacattttatagcctctgtgcacaaaaataatgagattgaagctaaactataggggcttgctctcagctagttcaattgaattaaaataacacatacttaaacattttaaagtacttagccagggtctagttctgcaatggagattcttaatttaaaggctgtttttcttcctctcacaaacagtggcccaaccttgaagaacagaaagctgcttagcacccaaatgaacatgattccttaaaacaagcataacacccttggctccattccagatctcgttcatgccacagttcatctggattcctataattcctgtatgttcccatatcttaattgcccatagctgtgttgccagtacaaacaggatgagggaagagtgcacacccttaatgaatacatctaccaaccctaagaaagcaccatcatttgaaactctcaatattctttctggcactaaatggccatctactgaagtgctaatatggatatctggtaacttaacgtttcttccgagcaatgcttactccctactatctttatattctagatagagggctaccatttggcataaacaaaaattcagactttccattcagcttttcaaggaagtatattttgaaacgaattcctcagagtgctgattaatagaggatgggcattctgggctaaggtgggttccagaaccttcctgagttctgtcccactggccattttccttgatgatttgcagtaggacacagctggcctactggtcccccttgaagaagatgtgctgctgggcaaactggaagactcactgtggtggtagtgtgtgcctgtacaggtccagagcccctgcccgtagacttggctgtgtccctggagttgagcagcacagtgggaagtgcctagtacagaagaagcacctcagaaggaataagttctagtgtgaattcaggtccttttccacctaaacaaacttgaagacctttgttccttatctgtgagttttggggattgaatgaaataacatcaacgattcttcattttattacacaacactgtgccctgcagtatcatttaacaaatgaatgcacaggctcaccacatcagacttcaaatccttctcagcatatttaaaatcaggacttaaatcaaataagtataccctgaataggagtatattgtaaatattgcacagggtgtaagcgtaagatgatgacatctgcaaaactgtttgtgtggaaaagaccaaagacttgtaatttattagacattcagaatacaaagaatgtatgatgtgagtgcaaaggtcaaaaaatagaataattcattgttgggatgcattcataaaagcataagttccacataaggaaggggatagatagttctactctattctgccttgagaattatgttcagatgtaatggttcaggtttaagattggggcaaagtagagaacaactagaacaagtgaatggctttcatgacaaaatgtgaaaggaaagatgggatgtttgcttacagaagaaaagagatgaagaagagaagatgcaaaaactggcttcaaaaactggcttgatcggccaggcacggtggctcacgcctgtaatcccagcactttgggaggccaaggtgggcggatcacaaggtcaagagatcgagaccatcctggccaatacgtgaaaccccatctctactaaaaaaataagaataaaatagccgggtatggtggcgggtgcctgcagtcccagctactcaggaggctgaggcaggagaatggtgtgaacccaggaggcggagcttgcagtgagccgagatcatgccactgcactccagcctggacgacagagcaagactccgtctcaaaacaaacaaacaaacaaacaaacaaaaaactggcttgatctaagtaggatcgagtggaaagggaatagatcatcttatgtggctgaactagacccacttatgtggtgtagctcttgtagaaagcagctgtcagcctgaggtagggaagaactcttgtactgttggaacaatggtcagaggctgaagtgggccacctgtctgggttctaagttctctgtcactgaagggttctgagagaaactgtcttgtcttgtcttgtaaagaaaattgcagtaagaagagtttgatgcttataagagagagcacctagtaggtgccaggcaacccctttgtgtgctatcatttctaatttcaataaagacttgcagagaaattgaacatcagctgtctttgctttttacttctctaaaactggataatccagaccatgtattcctcttcgtatttattcactctcaagccattaatttaatgtgctagtaataacagcccatgccacttggttaagttggtaaacagcttgcaatcctagcagggtgtgccccgccacttattagcttaagctttagggcagagcaacaaatcagcacagtgcctcaaagtaattaggcaattcccttacagaaaaattagcccacaagcaagaagcttacagaaaacacaaagaaaatctcacagtacaagacatgcattggccattacatgcatcactgctataattttgaaaagattagagaaagattttcggctaataatgacccgctacacccattaagcatgtcaaaagtccatactagtcattacagagctgcaggggaaagtgcattcgtttctggaaaggggaatgttggcgtttatttgttgtgggataagagtgctttctttgcagggatgagcaagaatgtccaatgctgagcaaggatgtccagggctgtgtggtttaagtcctattttgccaatgcttggtgtcatcctgcaaagattttacccttcagtttcttaatctgtaaaagagatcaaaataaaatgtgcttctaatctattaaaaggttaaggatgagatcctaaatttccaagtttaattcattaaaggaatcaacacaggccggcttccttctactgatcttgtttgaagcctttactgcattctagaatggtatatggttatctgtgtcatgggctcactggcctcattaaaagccatgaaagaaccaaaaagatgactattttgctccctggatatcacagcaaacaaaagcacagattgaagggaagtgagaaaaagaggagagaaagaaaatggagcaaaggaagtagaaaagataggaagggagagagaaaaagaaaaaaataaagttatctgctttaagggatgagattatggcagagaagagctgcttcagtggcctgttccagctgtgaggaccacctgccccgatgaggccattgggaagggacatatcacattcacggtttacctgcccacaaacgtgggtgcagccatactcttcatgctcatgggctctgagactcctctacgttaggcatcggcctcttttttttttttttttagacagagccttgctctgtcgcccaggctggagtccagtggcgcaatctcggctcactgcaagctccacctcccgggttaacgccattctcctgcctcagcctcccgagtagctgggattacaggtgcccaccaccatgcctggctaatttttttttgtatttttagtagagacggggtttcactgcgttagccaggatggtctcgatctcctgacctcgtgatccgcccgcctcggcctcccaaagtgcttggattataggcgtaagccaccgcacccggccggcattggcctcttaacatcaacagttggcctgccctttcagcacccaatgcttttactgctaacacccagtacaccctacacaaactgcctgcacaaccctgagcctgatgaggaatgtagaggaactgaagtgaaataggtgtctccgtgtaggtggggttttatgaggatgatggaaactttggaatagaaactggaaaccccatgtctgacacagttcaagaaaactaaacaccatgggccggcaccactgttattttactttttttttgcgcagtgtaagaaggagcccaaacactcatgctgacagtacgcacagtctcaaatagcagttagatgaaggccaagtcacgtaagctgatgccgacacaattagactcaccattgccaacagctcgtcaagtctgatatcatccccctctcggagactctgtctttacatagcagatgctctggtgctgtgttacatgtaataggtgggatggccggagagaaaatcagaaaccaccgctgatgcgctgtttatttcttagtcattttatgttaaattgctgtgacttgaacgtcagcagtgtttgggatgtggtagtgaaataaaatccatatccagtgtgccaagacaaatttcagaaaaccccaaaacacaattgtcttggtttcttgctggctgtgtctgtgcacacacaaatagtagctagtttattgccctccaaccactcggtgggttgcttgtcttgccacactctggggaatggctaatgaaccccaaactacttccttcaaagctggggatgtcaggaatgaggggccactacacattcattaagcatgtcagaagtccacaccagtcactgctgagctgcaggaaaagtgcagtcatttctggaaagggaaatgagggggtttgttctcttcattctgtgggcttgtgaataagagccaggggataccactgagaacagcagcactaggcaccaatgtatggggatctgaaagaccctgggcaatactggtattagtaaagtgcttctcactgggaaactttcacactgggtgagcccccaggtctccacatcaggtgcgttctcttagggagtatccgtgaaaatactatggccttgcattaaagtttttcaagctttacttcaaggtcaaacttatctctagtggaggaggagctgctgccttgttattttatttgtattttgttgccaccacgctccattgcatgtgttggtgtttctgcctggcgtggtagtcataccttcaactcaggactcctttgcacagaaggcaggatattatactgaaaagctttggattcaaaggctagcctcacttcgactttagcccaaagttattttactttcctcactcttgatttattttcttttctttttctttttttttttttttgttgagatggagtctcgctctgtcgcccaggctggagtgcagtggcgcaatctcggctcactgcaagctctgcctcctgggttcacaccattctcctgcctcagcctccagagtagctgggactacaggcgtctgccaccacacctggctaattttgttttgtatttttagtagagacgggatttcaccatgttagccaggatggtctcgatctcctgacctcgtgatccacccacctcggcctcccaaagtgctgggattacaggtgtgagccaccgcgccaggccttgatttctttatctgtgaaatggggattaaaaaatggcctttgcagtgatgaagttagtaaaggtattataaaatgagaaggggacataaaatagaattctgagcctgcagtgaaatcaggtcattctttttggagtaggaaaggtaggatggacatttttcattcctctctagctagttcatgacgctgagtaaccagaagggaagcctggtcaagtgcattgtggttagaccatcatagtctagggcagaagttctcaaacttgagtgtaaaaaagaattgcctactattcacccagtagatctaatatggaaccaagtaacaagcatattaataagcctatcaggtgattttgatgcagggggtgagtaaacaaatatctaactaacatagtggaatttagggaagaaaaacaatttttggaggctccatcggtggagagcatgatgtaatggcagaactggaagtgggctgccaggccatctagctcaccctgccaccatattcaggaagccccactgcatcttttgggacagactgcgccttgtgagtacacaggttcttccagggaggccagtgaggtgtgatctctcacaaccttgaaagagagtgagttgtttggtttcttttttttttttaatcttctaaatttttagaaaattatttttatattgagtcaaactgtggctccttggctatatagaaagtaagtccctgaaatctttgaaatcccttgagatttgatatccctaagtcttcccttcttcagtctgagtactaccagtttctttcagtgaggggtgctgatcctggctgtacatttaaaatcatctgaggaacttaaaactaagtccaccccagtcaattaactagacttttagggacttcaacccaggcatcaagattttcaagttcctccgttgattaaaatgtgcagtcaaggcagactactactgcaaatcatagaggaatcctatttttccagtttaagagctttagaactcttcctcttttctctgtcttactctttttttctaggtataaagcctgatccaaagtttaggtgcttgagccaggtgcagtggctcacgcctgtaatcccagcactttgggaggcggaggcagtggatcacctgaggtcaggagtttgagaccagcctggccaacatggtgaaatcccgtctctactaaaaatacaaaaaattagccaggcgtggtggcaggcgcctgtaatcccagctactcaggaggctgagacaggtgagttgcgtgaacccaagaggcggaggttgcagtgagctgagattgcgccattacactccagcctgggccacagagcaagactccatctaaaaaaaaaaaaaaaggccgggcgcggtggcttatgcctgtaatcccagcactttgggaggctaaggcaggcggatcacgaggtcaagagattgagaccatcctggctaacacggtgaaaccccgtctctactaaaaaatacaaaaaattagccgggcatggtggtgggtgcctgtagtcccagctactcgggaggctgaggcaggagaatggcgtgaacccgggaggctgagcttgcagtgagccgagatcgcgccactgcactccaacctgtgcaacagagcgagactccgtctcaaaaaaaaaaaaaaaaaaagtttaggtgctcctttgtctttctgtatttctttgtagatttcttttcttctgtcgtatatttcagcagttctgaaatgttagggtacataggaattgctcaaggagtttgctaaaatgcagaccaccatccatactctttaagaaagactgttatataggatccatatatccactgcaatgagcaggaacctgtgctgctttgtaagcctcgtttagctttgcctctaggagggggactagcttggacttgatgttgaggtaatcggtgagtacctcaggcaggaggataaacaaaacctccaggccactaccaattccgttcatacccacaccttctgtgtttcactttgaactactgacctttctggcttatcttggaaaatcccccacgaggacactgagaccagtgcttgtctgtccttgacaattgtggtcagtgctgactccaagaaagctgatattaaacactaaagcctccttcttcttttccccggactttatcaatctgcttttaattgttaactaggactggtttcaccagctaggagtcaaccagtatgtagtcacacattggttctcaaactttgatgaaatggtgccatcagactttcctggatgattcacatttatcacggattcctaggcaaggctgatgccgtgggctgggagcctcactttaagaaccactgctttagcaaatacagcaaatacctataggttcttgacccaagcatttcaacattcacgcactttcttcctgccagttttgtggtgtaaccaatctaagagggaataaacaatagatagatggctgaagcattgccctcctgaagggctgaaccctagacatcattgggggacttcttgcaagcctcaaatctacattctgtttcagagctcatcacatatgagtgacattgtaagacctttattcagttttgtttttttattaacctttaactttattttgaaattattttattttattttattttatttatttattttttattttattttttgagttggagtctttctccgtcaccaggctggagtgcagtggtgcaatctcggctcgctgcaacctctgcctcccgggttcaagcgattctcctatctcagcctcccgagtagctggggctatagacgcctgccaccacgcccagctaatttttgtatttttagtagagacggggtttcaccatgtggccaggatggtcttgatctcttgacctcgcgatctgcctgcctcagcctcccacagtggtgggattacaggcgtgagccactgtgcctggattattttaattttttttagagacaggtctcactctgttgcccaggcttcagtgcagtgactcagtcatggctcactgtagtctcaccctctcaggctcaagtgatcctcccacctcagcctcccaagtaggtgggagttacaggcacatgccacatcacccagctaattttttattttttaatagaaatggggtcttgtcttgctttgttgcccaggctggtctcaaactcctagccttaaccaatcctcccactttggcctcccagagtgctgggattttaggcatgagccactgtgccaggcctgaaacaattttagactcacaagaaattgcaaaaatagtacagagagttcctatatacccttcaacagcttctcctaatgatgatcacaactgtagtacgttttcaaaggggatggataacccatttaccatgatgtgattattaggcattgcatgcctgtatcgaagtatttcatgtatcacatgaatatatacacccttactaggtagccacaaaaattaaaaattaaaaaaaattagtacatataaaaaccgaagaaatccaagcctagttaatagtattgtaccaatgtcaattaaactttttaataaaaatagtcctaatatgaacattgtagtgaaaggtgaaattgcttgatgcagagctgtttagtggaaagttaggatttctcttgtcaccttttctgatggtcaggtttatagtaaaacaggtgaaatgttaaaggatagtggtggggagtctgtgagaactttggggactggaattgctccctactcagtggaaaggaattagagtatatagcgtcatgtataaactgccccaggacacttagctcctcctgttctttctctcctcttctaatttggtctgtcaggctatcagagcactgtctctcgggggcattcatgaaaggcccactgaccacctggcagttctgttacggtatgggaagggaggcagggaggaaactgtgtggaaatttgtgctagacccagcgctccaactttccatctgcttacttatagaatcctgacaatatgacccaatacatatgaggtagaaaattatttacttcattatatagatgaagaaacaggctcagaaaagccagataatatccctgttgccacaaaactaggaactggttgattcagttcaaccagttcattcttaactggattagaattcagatagccttgaaggtcctttagtacttaagaatcctataactatatgaggcttcggcagggctagctacaaaatttgcagaatcctttttcaatatgaaaatatggggtctcttgttcaaaaaaaaaaagaaaaggagtactattgaagatgctaaaatataaaactttttcctttgttccatggtctccctctctctgtctctctcgctctccaactgtcacggtgtttttttatgtgctgtttgatattgtgctcacttgggcatggggatgctcccagagtgacaggagactttcatggggacctgagacccttgccctaaaacttggaacatgtagtccagcagctgctggggtccccctgccacaagcccacaagattgataacacattgagccaggtatctcccttcccatgggactgccacttcaacccatagggttgcaaactctgcactgggatgtgcttggtacctggattaagagggtgcatgaaaatctcagaaatcacccattaaagaactcattcatgtcaccaaaaagcacctgtaccccaaaaagtattgaaaacattttaaaaaaaggagtgggtgagagacgtgcttctactgggttgctccctgaacatattgtggcactgccagcttgtggtggggacagctgccaccaggctttttcctgaaatggcatgggttgtgtgcctgaccccaactgtcattgggtggaggaaaacagtggccactgggcgggccagggaaggcagggtgagattggggacaccagaaggcaaggggtaggaggcagagagtcctgggcaagtggacaggtgacaggaggtgggatggcacagggctgaggtccccagccctctgtgcatgctccattgtcccataagacctcgcttacaaagcatcaattcaaaaataaaatgattgagaatttcaagatggtgactagagaggccacagagcactaaattcaggtatgagacctttctgaggatggagaccctgtgcccctgtgctggccacacgctcatgaagtggagaaaaactataaggaaagatttgtgagttcaaaatacttacatacaatacgttggtaaattttttggagcagatacaagtcaacatataatgttcatacagtagtatgtgattaagtgctgtatttaagctttttgtatactgttactttggaaattagtgactagttagattttctcaggttttttttctctcccttccgtccccaaaatatggttttgcaggcatgtgtggccaaggttgaggtgagggggacaccacttgatgacatactggaatcttctatgtgcaaaattttccccgggaggaaggcccatgagaaagcctgggaggaggaccagaatcagcctcctggtgtgaaatccaaagggttgaaggaaaatcgatttgattgaactgaaaaagtaggtcagaaattgagagaaggagcgggccaggatgtgagtgtggataagttggcaaaggtcaaacacaagtacctgaccacctggcaatggaataggaactgggatgcgcattacagaggactttagcgagaactcccattccaaagggggaaatgagttcttggaggaagcagaggaaaaagctccatccctccaagactaagcgggtggatcagagctgcacaagccattaagcccctaccccgggctccctcagtggagggcgggagcctgccgcgtcccgactgggcatcaaggggcctttttgggtctccctgctccgtgtatagggtgtttatgaagtaaaggcagggtcaaagactgtgctagagcaattgacagtaattttgttgtttccaaatgaggagacatttggccagttgctcatgttcctcagccagccagggggcttgtgacccagagcagatgacagcacaggacagctggcatcaacccctggaaggggtagttggttcttcagttgacagtttttaccacactctcgtatgctggagcaggagtacaggcagggaaggctaccggctcctcccggcctggtcgcttcaccatggttacaacaccaaagcagtggctgatgggggctgctcagcagtcctttcactgtgtgtgttagctacttctacttataaaacaaggaccaaaaatgcagatttgtgttattagacagttgaaatataaacagcctaaatgcttataagagccagaggggaggagggctgtttgccaatgtataggaagcccagctgaacaactgtacttaactagcaagctactcctgtaaatatttgcaaactccccttcaaagctcaaaagcctaggacaggatcattggatgatttgcttagaagaagaagaaacaaaattgacctcatggtctgaggcagccataaaaagaaaagagtgtggatgggcagaggaccagaaaaggggggaaaaaaatggtccaaagtttaataaacacaaaagagataaaaataaatctcaagagcacttatttacaaacttgatggaaggataagattgaggcaggcgtgtgtgaaagatgggtgtttgtgaaagtggaagaggcctgcagggattccactgaaagaggcggggaaaattgaatgagatgtttactcttcctaacgacaggaaacacgctaaattagcttctctattccaggatgctccttcaaaggatgtttgaagcttctgctgtctaatgcggaggctctgcgaagatgaatgcagcatcagcctgtggaaggttttggccaagacggtgtgcaatgccagaaagcctggccccagactggcctaggcttctctggttgtctggcctgttttcagctgagctggtcggcataggaccagctgttccaatcatgggggcgggcatattccagaggagaaaaagttctatttgttctcagcagctaccttgtcaaaatgctgtgtgctagggggctccaaaagcctttctgcgtgcaccagtgccccctggcctggaagccgcccatcaactaattcgcagtggtgatgcggcggatcatcaccatgtctgcatgaatactttttttctttgaaacctggatactttggattttttggggtttttttgtttgtttgtttgtttctgagacttctgactcctgggttataaagcctcaattcacacagtcattttctgaaccagtatggaggagactggtgtagaaattccccgcttctccgtgggcctgtgtgctgagagtcacacatatataggggaaggagatgggttgggagaaagttcctatgaaggaaaaaattcaggctcttaagatgagaaaatgttggtgtgttcctagcatctttttttcttcagtgtaatcgtcagggcatggatttcccaataaatcacggaaggtatttatttctattttaagatcggcaagatggctcatttatttaataagaagttagtgttgccaacagtcagatgcctgagtctttcaagagactcctgttgatgaccaactatgcaaacgggatatttggtgaaccctgtccagatacgtgggaaagaagaaagacctggcaaatacagtctctgccctcaagattcttaaaatttcacaggggaaacaaaataaacaaacataatgcagaagtaataaaaacatttataaagaaacatgaacaaccgtgaatgattatttgtaatgaagtcagataattgaagagtgggtagaaagaaatggagccactagagttggatgaaacactctggaaaggggaaagaaagtgtgtaggagattttggaagaagattgtagaaacatacctgtaacaagtggtctgcacagtgtagatgcttgataaatgaatattgtatttgaaagcatggagttagaataggacctgctctggtctttgtatagcctcagttgcatattcaaagacattggcagattacaaaaaaaaaaaaaaaaaaaagccagcacaactctaaagcaacccaggagcttgattgattgattgactgattgatatttgagatggaacctcaccctattgcccaggctagagtatagtgttgtgatttcagctcactgcagcctccgcccccggggttcaagcaattctcctgcctcagtctccggagtagatgggattacaggtgcgcgccaccacgcctggctaatttttgtatttttagtagaaacagggttttgccatgttggccagggctggtctcaaactcctgaccttaagtggtctgcccacctcagcctcccaaagtgttgttggaattacaggcgtgacccactgtgcccgtccttcccagaagctttaaaatgtcatgtaccatcagcaactctgtattttacatggtttagaactgaaggaatttgtgccaattctttttcttcattagctaggatgacctcccgccaacagacattatcctgcataaagaattttaaaactggatctggtataagctagtacgtgggttatacttttgtttattcaaatttcctcatcataacttgactagagaatatgttaagtcatatgtgtgtgaaaaactaaaatattgaagccaaaagagattcgatatatgagcctggttaaaaaaagattatttggatgacaaactttcaaggaaaaaaaatacatgggcaaactgctggccattaggaactattttcttggcacatctgattaaagtgtatgcaggcctgacagctctctccaggcatgaactgtcataaacttgttccaattcaaaaccatctatgatttccaccagtctgtcagccttcaaaggatggggttaactgcatgctttcaaatggagttggaagtggtttgttaatctctattaatttgctactcctgtaactaaatgcacatgtttattttatttcttttttttctggttacattgttaatggtattaaactggccgttggaaactattctgtagatatttcccttatggtttcttgggattatctcacgctacagtcttctctgaaagcacaatggattttatcattttcaatgattgccctaattttttacagatgccatcccgcccactttctacagaccctacttcagaattgttcgatttgacgtctcagcaatggagaagaatgcttccaatttggtgaaagcagagttcagagtctttcgtttgcagaacccaaaagccagagtgcctgaacaacggattgagctatatcaggtaatgttcatttgttgttgttgttgttgttgttgttgttgttttagacagactctctctctctctctctgtcacaggctagagtacagtggcatgatcacagctcactgcaaccttgaactcctgggttcaaacgatccgcttgcctcagcctccctagtcaatgggactgcaggagtgcaccatcacacccgattatctttttaaaaaactttttttagatacgaggtctcaccgtgttgccctggctgatctggaactcctggccttaagcaatcttcccaccttggcctcaaaaagtttggggattacagacatgagccaccatacctggctcatttaggttgttgtaatgggcaatcagtttgaggtcttagagtaaaagaattctagtgtcttagattttcttagctgatataagccatgctatatattcacaatcgtgatataggccctcatttactattactgttctagtaatagcttgttcctaatcactcaggagggaagaaccctttagaatgcagtattgaagctctgagcacacttcctcagttgcatgaacagctggagtatgtactcttcagagggtttggttccagaagtcaacccgttaaactataaagtcagataatgtaggtccgatttcttcctggggaacagtcagttgaccttcctttattcatcctatagctgtttctttctccttttctatgattttctctttgttttcttattgtcttctctcttcctttttcacttttttctcctctctttgcaacctccttctctttattaactttatcccgtttccttttcctttctaattctacccactgtctccagtctacccactcaatacacacacacacacacacacacactttcctccattatttggacagccctgatgtctcctgttctcatctttgtagtggagttggagttggtgggcagctgcgtcaaaatgtaatgatgatgatgatgaaatgccaacttgctgagattttcagagatgttcttaaaagcttgttacccgagtgtagtctacagggcatttgcatcggcatcacctggggctgtgagaaatgtagaatctcaggccccaccctagactttacagaatcagaatccccattttaacaagatccgcaggtgcttcttgtgcacattaaagaaccacttgaaaaatcctgagtctggtgcagccttgtaaacaggcaacttaaatacatcctgatgccatatgaatagtggtacttgcatatagggtataggcggggaaatttcaccagggagctgacattttgatgaggccttgagacgtatctattaaaacctgatgggggatcatcattcttggcaggaagggcaggcactgcaaagacagtcttgaatgggcttgctgagggtacctgatgcatagcgctcagtgcctggaggtgaggagagactggggagaaggtggccctccaaagatagtgtgtagagtgacactacagaggattaagaaaaaaccccttgggatccccgtgataaggggtatatatgtgtgacaatatgattaaaacatgggattacttgagaaaaagaaattggcatctatgtgcagaaaccgctagtttttctggactctaatcatttggaatttgtgataattaggatcaaaattttctttgtattcattatgaaaatagagaactaccacacaaatgaatatgagacctgaagaatagtttaaaatacttaaagcagtcattttgttttctttttctgtttttttgagacagcatcttgctctgtcacccaggctagaatgcagtggtgcagtcatagctcactgcaccctcaacttccagggctcaagcgatcctacaggtgtgcatccccacgcctaactctaatgtatttttctgtttaatttttagtacagatgagttctcgctttgttgccaaggctggtctcttaattcttgagctcaagagatcatcccacctctgcttcccaatgtgctgggattacaggcatgaggcactgtgcctggccccagttttaaagtactagttcacatgtgtgttcatgaagaataattcttacttatttaaataggccctcgagaacctgtttttgagacttttaaatcctaactggcattctgggtagcaccaatgggccagccgttgctcgtcgccccaaggtcagagagcatgcttgtgtgaccagacactatgctgagcaaagactcagaagtattgtttccaatgatactcacagctatactatgaagtttgtacaatgaagtattctttctgctattatattcttttccatttcacagagaatggtgctaaatcccagagaaattaagtaacttggccagggtcacacaggtgggaaatggcagggctgggatacaaatccacctcggactcccaagtccctcctgcccctcaccacatactatgctattcctagcaaaattttccctttctcttacccttgggatcagccagaatagaagaataataagacaaactaggctagaggatgaagtaatatttggaggggaagcaaaaactggttcctatgaaaaaaagccagattaagggtagccagataaattacaagatgatttaaacaaacaaacaaaaaacatgattatatctcctttttcttctcttttttaccaattaaatcacccttaaatttccttctttgctgacgatagcatcataggttgctctctttggccctactttagttacatggcttcagtaaattggaggcagggtcacctaggtcctgttacctgtaatggaagctgctaagtccctatttttctgtggccccttgaccctgtcctctgaggagtagcctctgccagcaggcttgccaatggcttttttcctcccagggcccatcccatctccaggaaagggtgtttctcttgaggctggcaacttagaggaccttagtgagttcttggtagatgtgcctcagaggtttctgaagcaccggctgctccatgacgcaagtgacatgatgtgcatggcttagagtcccacgcttgaaagaggaacggcccaagatggaagcttttagtttggagaagcatgggcacgttcactgtcactatacacgggcatctggaagaagaagattctagcagaaaaatataaaataatagcaatttttttatctttctggggctcagctatacaactcctgaagcacagacaaggtccagagagcaagtcaaagagatccttgaacacccgaagagaagacaactcacacacacttttgatggatcagaaaggcagcctcttgtcttttattgcttcaactagtttgactatctgtagggccagaagaaattagaagcactgaattaaaagaggagggctagaggaggacaccgtgacatcaacagcaggtcctttagaccagcagtccccagcctttttggcaccagggaccagttttgtggaatacaatttttccacagagcattacttttattgtgcactttatttcattgtaatatataatgaaataattatacaactcaccataatatagaatcagtgggagcgctgagcttgttttcctgcaactatatatggtcccatctggcagtgatgggagacagtgtccgatcatcaggcatttgattatcataaggagcgtgcaacctagatccctagcacgtgcagttcacaatagggttcttgctcctttgagaatctaatgccgccgctaatctgacaggaggtggagctcaggcagtactgcaagcaatggggagtggctgtaaacacagatgaagctttgcttgcttgcctgctgctcacctcctgctgtgcggcccggctcctgatgggccatggacctgtaccgtccaggttggggacttctgctttagactaaagatttttaccactgtatcacagtaacgctatctcagataatcagaccacagaagcaatgcctgttgtggacaagttttctgaatcttaccctgtttatagttaacccactctttatctctttggcttcctgtctggcttctgacttttgcttctggcctctttatttggagtcctatttttagtatggtgttctccaactttccttttgtctccggctgccatttggaggtctttgtagtctttggtaataaactcccatctctagtcctattacaggaattgatgccgatggtaataaccttgaattatgaagatgaggctaaattatagtcaggaaactgaacacatgcaataaattttacagagtttcacatccaaaattgctgaaatattattttggaaaaaaaaaacagatttgatgcttaaatgggcagatcttcagctatttggaaagctcagctcttcagaagaacaaaacctttgaagttcttggataccctttgattactgtactacttgacacacaattggcatcctaatccctagaggaaaacagggtgactatgaaaaggttctcaggtcgtttacatggttgtttggattatttattaggactcttcaggacactgatgttcagtaggaggagagtatgtatgtgtgtacatgtgtgcacacgtgcctgtgaacttacatgtgagcataggcactccaccaggtttggaatccctgggggagcttttacgaagactaaccacagtttccttcaaggggattctgattttccctggaaaggaaaatgagagttgcctcggcacagatgttggtttcaaagagctctcctggtgactcacatgtgtgattgttcagatttggatcttccaattggaattcgcagatttaaaatatagcccaagagttttgagtcattctgtctcataaaaatgccgccaggtattctttttagagtcacaatatgaggctggatggacgtaggataacaattctatacatgagttcagggtttgtcttgtccagagctgcgaaggtctattgtttctctccacctgggatagttaggaaacccatgcttctgttgaagtcactctgagcttgtttaaacctgaaagcttgtgaacttacgattttcattaccctcccctctctacagaacagtgtgtcagaatattaatgaatgataggaaaataaaatctttctttcctgctttctctaacctctttcacgttaacaaactctaaatagcatctactggtgtgatcaagataggcttcccatgtataccaataatggagggaatatgagagggataaagtgtctgaaagatgaagggaaagaggagaaaacaaagatgaaaaacaactgtttttagatagtaacgatctttgccatatttttaaagctttatgccaaaggcagcctttattgcgatatgttcagacaaaactccagtgctctaggaatgcattcaaacccatgatagttgttatagctctcagcccatttgtaaatttgaacacacctttctttgattaagtttcccctgtatgtatgattaaaatcatgaccagaagtatgaggtagagggaaagaaaataggaaggagaattctcttcaagttgaacatcttctatatgggcaagaacacctgctgtcttggagttggataaatccccattttacacatgaagaaatgcttggggaacttaatgacatatctaagggtacccataacttcatggccctaaacaatcctttgggaccaccaaagaatacttatatttaaatttgctaacctcagaggacttggagctctccagtatttctagtttcttctcaccaactcacaccctttcaatagtcatttctcatttaaaaccttaccacctccagaatagtatgattcataccactgtctgggttatctatttgctgcacaacaagcttcaaaatgttgtggcctcaaataataatcattttgttatacttcacaagtttttgtgggtcagaaatttcatcagagcttggctggatattgtcttgctccatgtggctttggctggggtcacttggtagcatttagatgacagttgggctggtctggaggattgatgatggctttgtgcctatgcttggaacttcagtagaatgactggaaggccgggctcagctgggctcctccccctagatagtctcagatgtctccatgtggtgttcccagaagagtagtcttgtttcttacatggggactcaggtgtgcaaatgtctaaggtagaaactgcaagtcctcttaaaaacagcccagaggctgggcatggtggcttacgcatgtaatcccagcactttgagaggctgaggcaggtggatctcttgagcccaggagttcaagcctgggcaacatggtgaaataccatctctactaaaaatacaaaaattacccaggcacagtggcacacacctgtaatcccagctactcaggaggctgaggcaggagaatcgcttgaacccgggaggtggaggttgcagtgagcagagattgcaccactgcactccagcctgggcgacagagccaaattcagtctcaaaaaaaaaaaaaaaaaatagcaggcccagaaatgacacagcatcacttttgccttactctattaatcaaatgaactacagggcagcccagattcaaagggaaaggaaatagatcccatatatcaatgggaaatgtgtcaaagaagttgcagccatctttaatcttggaacactaacccactgtgtaaagtaaagtaatagtcagccgactgtgagtgtgcacctcctggcatcagcatcatacctggtgccagccatctggagataaattagcctccaccttctggttactcagggtcttgtgaagaaatgtacatataagtgatatctgtctatgaataaacatatacccaagatactcttagagcaaaagctggagaattcagagaaatgcctcagaactcattcttgccagaaagggagttgtgagaatttgcaggcaacttgccatcttggttgggctcctttcgtgggcagacatgtaattccaaggaactgagccatatgcctgaatcaagagattcctttgaacccaacaatatttgttgcagagatatctgaatagattagattgaaacaggagtgggtttggttaattggtatgcatagtattacgtcagaacgaccttcctcgtgtttcagtgtgcgtactcacatcccaggatttggtgactacgtctgtcctccccgtttaccttattgaggcagcatggcatagtatgcaatggtatgggcgttgtgacctaagctttcttagtaattcccaattagcttggggtttattatgagggtgaaatgaaataatgtctatgacggccaggtggggagtgcgtgttcaacatgtgttagttcccttcctttgctgtcactgcttagattttgacttctatgtctttgattcctccagtgggaagagctctctcctaagttacctgtgaaagtcagttgccaggttgtttttaagactgatttattagcttcagagcactgaataaagtcatacaaaaataactccctgggggaagcagagtgatgtattaggttcatacatcttacaatatcaggagaaaaagccactaaaatattgccttttcccatggggctgatagtctcaggtgtctccatgtggtcttcccagaacagtaatctgacttcttagatggagattcaagtgtgcaaatgtccaaggcagaagctgcaagtcctcttaaaaactaggcccagaggctgggcgcggtggctcacacctataatcccagcactttgggaggctgaggcaggtggattgcttgagcccaggagttcaagaccagcctgggcaacatggtgaaaatccatctctactaaaaaatacaaaaattagctgggcgcggtggcacatgcctgtaaacccagctactctggaggctgaggcaggagaatcacttgaacccgagaggcagaggttgcagtgagccgagatcacacaatctctgcctcccgggttgcgtcactgttggcgctggtagaatatcatctgccaatgggttcctgttaatcagtagaagagaaatgtgctgaggtgaatttaaaggggaccttagatttcttgactgtggcctgagaaggcatcggcgctgtgcatttctacagagaggcagggcatccagcttcagctgaagccaccgctagcatggcaaagggacccctctctctacagaaaactgtcaagactttggcaagtgaaagtacagatggtcccctatttaagattttttcaactttgtgatggtgtaaaagtgactcaacttacttttgttcatacgtatgatatcaggacacaatcccgttgtaagtcgaggagcatctgtaaaataaaatctgccccccatttgctctgacctctttccttcggattttaatgtctcattgcatttgcatttaaacagtaaccagcttgtcaaatgtgatgaaatgtcatttctagaggctatcggttgcaaggatataaaacagtggtgaaatcctaagtcatttacatccatttagttttgtatagtaaatattaactgatttttcagacttgaggatgatagggtgaattgatgtttatggagcaaaataagtaagggaagatggtagtggggggagtgaatcatcagctacctttactggacattgcatatgtaacatctctgcaacagattttaaaatgcacgttcttaaggtttcatagtgaaagttcagggtagatggcctaggcctaccttttaagggattctgatgctgcaaaattgaaaggtggggtttttgtcataccagggagcacagcactaatggggttaatgaaaattgcctctttttcctaaccctaaacacatgtgcacacacacacacacacacacacacacgcacacacggttcagctttcatttctcatattgcccaagagggtgtaaaataaaaagaggtcagccaaaaaactgtctgttaaattagacttgcaaaaatgctactgacaaacaaacaaacaaacaaaaagtcatactgtgctcctgttgtacataattttacagcatacaatcttcttaatactgatcctagccccggcgccacattggagacatacatagcatagtaacccacctaaaaaaagaataaaaaacaccatgaggtataataaacactttgtttgcacaaggctattaatatctcagggttttttttcaaactgatcaaatggcgtgcttgcctcataaggaaactggattgttaccatttgcattaggttataacattagtcagcagacaagaccccccaaaaagtagaatgaacagcagaccttctccactgtattcaaataaatgttagtgaatatgcaatagtaactaataatcttattcttttttcataatgtgactcagtaacaatattgataattatcgctaatacatgcagtgattactgtgtgctaaggtaggtactggtctcatccttattttacaagtgaggaaactaggatacagtgaagttcagtagcttgcccaggccaggcaggtaggaagaagcagagccaggatttgaacccaggcggtctgaccccagggatcatgctcttgaccatgattccatactagcagaaagaacacagattttggagttgatcagggtgggtgcaaggcatagctttggtcctttggggagtctgaggaagtcatgtcactaacactatttccacaccagtaaaatgcagatgaaagcacctacttggcaaagattttataaggcatagagataatgcatggaaacttctagcacagtatctgtatcctcagcggttactattattatcattacagtttccgagcattgagtttgaactgttgtaagaaacagtgtgaaatttatgatctgctcagaatctgttaaaaatgaatgcttcccctagcccttcttgctgtagggtctgggttcttggttgctgtcccaggagtttgcttcagggtctccttcaagaatattttccactcactcagcttgtggtggttcattaagttgcagatgagcaggccgggcgcggtggctcatgcctgtaattccagcactttgggaggccgaggtgggtggaacacttgaggtcaggagtttgagaccagcctggctaacatggtgaaaccccatttctactataaatataaaaattagccaggcgtggtggcgggcgcctgtaatcccagctactcaggaggctgaggcaggagaatcacttgaacctggtaggcggaatttgcagtgagcccagactgtgtcactgcactccagcctgggcgacagagcgagactctgtctcaaaagaaaaaaaaaaaaaaaaaaaaaaaaagttgcagatgagcatatcagagtgggaaaggaggagacctttgcagccagtcagccctttctctgaacctcagtttttcatctgaaactggagataacatttcttgcctaatgagttcctgtgaggagaatgcctaggttaagtgtctggcacacaagatgcggaaggagtaggttactgtcaggatttttcttgtcatcttgaacatggttcatatttcccctaaggttggcttgtgattctaaaaccactcaacagtggtgtcagtcatctctgcttggatgtggtctgatctgttttctgttaacagtgggacagagcagggttttggggaacagccattgttttatcactgtgtacatttgctttatcaagatgttaagggctgcagtgctgaactgggggctgtgctctgtcttgcttctctttttgaagagtgattacaatgactgactccaataggggtgtctttttatctcatctcctgtcttgttactacctctccctgctccaccaccacacaaataggtttgatatatgcttcccaattgatttttaataaggttccttttttttttcatgttgtaaatgttcagtatgccaactatcctgtaacctcctttagggcaaaagctgtttcaagggagcatgcatgttttttttctcaatgccaacagtactcaggatattttttggaaccccgttctagaactgtggcagagtccagcatacatacttgagaattccccaaaggagacaaatctggatttgcgaaaggtagtgttgatttttgaagactgccaaagttctatggaagaggaaaatgataagtcattcagctgattttactggttcttatatttctgaaagtcagccacctcccatgtctctgctgttactatgcttgtccaagcagttcttgtccctcacctgggccatggcagtggcctcctggttggtccccctgtttccaccctggccccttgatatggtttggctgtgtctccactcaatctcatcttgaattcaaatgtgttgtgggagggactgggtgggaggtaattgaatcatgggagcaagtctttcccatgctgctcttgtgatagtgaataagtctcatgagatctgatggttttaaatagaggtggtcccccgcacaagctctctttctcttctcttgtctgccaccatgtgagatgtgcctttcaccttctgccatgactgtgaggcctccctagccacatggaactgtaagtccaataaacccttttctcttataaattgcccagtcttgcagcagtgcgaaaatggactaatacagtgaattggtatcagtagagtggggtgctgctgaaaagatacccaaaatgtggaagcaactttggaactgggtaacgagcagaggttaaaacagtttggagggctcagaagaagtcaggaaaatgtgggaaagtttggaacttcctagagacctgttgaatggctttgacaaaaatgctgatggtgatatgaacaataaggtctaggctgaggtggtctcagatggagatcaggaacttgttgggaactggagcaaaggtgactctacgctttgttttagcagagacagatggcattttgcccctaccctagagatttgtggaactttgaacttgagacagatgatttagggtatctggtgaaagaaacttctaagcagcaaagcattcaagaggtgacttgggtgctgttaaaggcattcagttttaaaagggaaacagaaaataaaagtttggaaaatttgcagcctgacaatgtaatagaaaagaaaatctcattttctgaggtgaaattgaagctggatgcaaaaatttgcttaagtaatgaggagccaaatgttaatccccaagacaatgggaaaaatgtctccagagcatgccagaggtcttcatggcagcccctcccatcataggcctaaaggcctaagaggaaaatgtggttttgtgggcctggcccagggtccctgtgctgtgtgcaggctagggatttggtgccctgcatcccagccactccagctgtggctgaaaagggccaacatagagcttgggccatggcttcagagggtgcaagccccaagccttggcagcttctacatggtgttgagcctgtgagtgcacagaagtaaagaactggggtttggaaacctctgcctagatttcagaagatgtgtggaaatgcctggatgcccaggcagaagtttgctgtaggggcagggtcctcatggagaacctctgctagggcagtgcagaagcgaaatatggagttggagcccccacacagagtttctactggggcaccacctagtggagctgtgaaaagagggccaccatcttccagaccccagaatggtagatccaccaacagcttgcaccgtatgcctggaaaaatcacaagacactcaacactagcccataaaagcagccaagaggggggctataccttgcaaagccatgggggcagagctgcccaaggccatgggagcccacttcttgcatcagcgtgacctggacttgagacgtggagtctaaggagatcattttggagctttaagattttactgccctgctggatttcagactttcatggggcctacagcccctttgttttgaccaatttctcccatttggaatgactatatttacccaatgcctgtacccccgttgtatctaggaagtaactaacttgcttttgattttataggctcataggcagaagggacttgccttgtctcagatgagactttgtactgtggacttttgagttaatgctgaaatgagttaagactttggggagctgttgagaaggcatgattggttttgaaatgtgaggacatgagatttgggaggggctggggcagaatggtatggtttggctgtgtccccacccagatctcatcttgaatttccatgtgttgtgggagggacctagtgggaggtaattgaatcatgggggcaagtctttcccatgctgttctcgtaatcgtgaataagtctcatgatatcatgataagtctcatgatatgatggttttaaaaagaggcattctgctacacaagctctctctctttgtctgctgccatgcacttaagatgtgactttctcctccttgccttccatcatgattgtgaggcctcctcagccaagtggaactgtaagtccaataaacctttttattttgtaaattgctcagtctcagctatgtctttatcagcagcatgaaaatggactaatacaccccctcagcagctgtttacagcatagcaatcaaagtgattcctgataaaatattggtcagatcaaagtcttctctttaaagctctacagtggcttcgtatctcaccctgagtagaagccaagtccttaccatgacttaggaggctggctctgacctgttccttagtcacccacccctcagccataatttccccctcattcatagggctcccccatttgtcaatgacctctttgctcttcctcagacactgcactcactccttcctgtggcttgtggccactgttccctccacccacagtgcttttcccaactacccatatggttggttctctttatttctttaggtctttccttagagaccacctgctcagggagaccttctttggccaccgtacctaagatctcagagtcgcttttcccaacacatcctagccccaatgtctactgtgcttttctccttgataatcttcattatctgccatatttgatctattccatctttatgttgtttataatcttatctctacctctagccataaactactggagatgtgtctggtccacagtgggtgttcaataagtgttttttaatgaatttaactaaaatgtcaaaataagattcaactataaggaatgtccttcaaataagtatgtaacttataaaggggattctgttgagaaacatcactcatttattcggatttggaaattctgctccatttgttttaaagatatctaaatattgatgaagaaagaaatgtatataactatgcatcttctgtgacttattcagagctaattctgatgaagtatttaatattaatagataataaccatgtaggtaaaaaaataaaataaaattatgtaataaattaatgaaactgatattcttgggtaccccataaacttgatgttttcagaaaaaacaagctctttatttatttatttgggcttgttagtttatagtcacatgccctaaattaaagtgctcacttaaattatagtacaggccacatatgttataggtgccaggaggtaggaatcaagttagaagtctactccccaagttcacatgtgttagtgttaaagtcagagtggaattggaagggggaggtcaaataaaaaattagaagatatggctccagagagcttgaggtcttgtggacagtctttccctcaatggcaggaaataggtaggtcattgtcaaaatttatactgctgggctgtgtggtacagcctcaaagactgtaggaattcagctaagaaaaagacagtacagtcttgatttaattctccttcaaattctaccattacgtattgtactgcacccctctctcgcctggtctatactgatgtggctttagtccagttgaatccttttctcttttgtgtgatttatacctgatggtctcatgaatgctactgagctgcagcatctgacagactttctgttcacacaaaggactccttcatcccttcaacctggagaaatggatttacttgtttatgcacatgtgcattcagcacaaaggttcatctgtaaagtttttttttttaatgaaggaaacaatagggaattataaggtatttcatcacagaggagagacttttctgtgtgtgtgtgcatgtgtgttgtgtgcgtgtatgtgtgtatgtgtgtaacttgaaggcacatctagtgacatttccataaaggtcatcaaaggtctgcgtatgccatactgtatcataatttcacatgggtatgtataatacaggtgtatatcaatgtgtaatactctgtactgtaaagcgaaagagttcacgtagtgatgtaataatgtagctatctgagctccaaagagacttgtattctcagtcttctgaggctgatatgtattccacgggagctgactgaaggccctcgtgaagctcttgccaggtatacattacttacgacctcttagacagatgcaattataaaggagccatgacaattacaggacatggtgatggcagaagcaaggtaagtactgggtgtgttaagccacttctgaaggataatcatgcagtgtgtcggtgtggtaggcacccccaaagtgacccagcataatcaaggaggctacagttagacaggaagagagagctccatttgtgcctccttgaaataaaagccactgtacccagttctgattctctataaagctccactggctattatttggaaattctctttcttgctttctctccctcatttcatttttataatgaaataaatagaaagggtaaaatacagtattaaattgcttattctgtctgataattctttctgtccttcttgatatatataatctctgtggtgggtttctggatgtgtttaaaattccaagaagcagtttttttttttttttatcactataaaagaccgattgttcaggggcttatttgtcacttgatcaaatgtgtctttctaatgaagtctgttaactaataagaatataccaagcagggattgggtaagctgccatgaaaaatactctgtgggggtaataagagagagaaagaacattttttgctttgaaggagctcatagttagattgagcattatactccccacagtataatttatgaatcactactgttagaagtgggattgtgtcccttcccctacacataaaaaaaagatatgttgaagtcataatccccagtactttggaatgtgatctgatttgaaaataggctcattgcagatataattagttgagatgaggtcatcctgcaggagggtgggtccctaatccagtatgactggtgtccttataaaaagacagccatgtgaagactcagtcacagggagcctgccatgtgaagatgaaggcagaaattgaagctatgcaactatagccaaggaacaccaaaaattgccagcaaaccaccagatgctagaagaggcaaagaaggatcctccctggaggcgtcagagagatcatggcccagccaacaccgtgatttcagacttctagcccccagatttgtgacaggataagttagtgttataagtcacccagtttgtggtactttgttactacagttctaggttacccatacacctatcaagccaactctccctaaatcctagtatatattgttagaaaagataaaagggcactgaagagagaggaggatgccttccttccttccttctttctttctttcttcttgttttttttgtttttttgttttctttttttttgtttttgacagagtctcgctctgtcacccaggctggaatgcagtggtacaatcttggctcgctgcagcctcaacctcccaggctcaacagatcctcctgccccagccttttgagtaactgggactacagatgtgcaccaccatgtccagctaatttttaaaaatgttttcatagaggtgaggtctcattatgttgctcagactggtctcaaacttctgggctcaaacgatccttccatctcagcgtcccatagtgctgagattacaggcgtgaggcaccacgcctggccttgttctcccttctaatgaaccagcacatccctattacctggactgtgttctcttagtgctggttttttggatgttcatagtcatccttttacactctcctctctacaggaaatcttccctgacctcatctacctggcaaggatagatgccctgcctgtaacatttcctggtaacctatgaacacatcgttttaagtttttgttgagatgtctatattcccttactacccaatgcactcctttaagaacaggcaccatcttattatcctggggtatacgtataatgcaatgctttgcttacagccagtgcttaatatttgttgaactaaactggaggaagtgaggtataaaataaaatcaaacaaatgaataaatgaggactcaagtgcatacaagatgctcggcaatgaatgaatgactgaacaaacaaattaactgatcatattaaatatttgaatattattagttattattattactttgaatgagggtaaaaggctcctccaaagccaatgaaagccttccagagtatggatgtgggagtgatgtgttggagaatcatttgttcctgctgtaggtaagccaagaaatgctcacaagagtgtgttctctgtgcctgtctgcctgagagaaaatcttggtctttaataacacggttttgacctagagagtcagatttctccaaaattaatcaatgaatatgtattctaccagtgtcagcaaaccaaaatataagggtttgtggggatttaaataagtttatgtttccctctctcttgtatgggcttaatattctattggaggaaatggacatttccacacatccaggattacccttgaagccactatgcgcaagggaccacatgctcagcaaatcccgtagcattgcatggggaactagggaaagggacctgactttagtttagagtgaaagtaagcatgtcattgaaaaactgggcttcaagtttggattagaagagtggaaaggcttgttttgttttgttttttaggagaaaactggaggagggaaaggcattctgatagggttgctagttagaagccaaagtttggaagtttggagtatataatccatgttttagagatattgtttagattaggcttctagggatgaaaggcgcgtgtgagatgataggttggtggccagttgtgttatcaatactgaactaaggaatctggagtttattcactaggcattagaagcctctgaaagtttttgacaaggtagggaacataatcataacaataactcacacgtattgaataccaggcaatgtgactgatgctctccctactccgtgacacttaattttctcgacaaacatacaaggtgcgttttactattccttttcattgatgagagaattatagatccagtaagccatagtttaggcttgtctgactccaaagcctctgcaccttttcgctacgctaatgattttcaaaggcacttggcacagccctatggcttcttcaaagaactctaagggaccactgagtaaatggaatggattgattgtcaggtggcccagatggccaggacccttagtcaatgagtgaaattccacttttttctgctgtataccctgcatatcacagagtgttgatttcagaaatggccaccaggaaggaggtaactaagaagccagcaacaggttctggttttggccttatgattttaacattgttatcaccaacatgatgaagacattggctgcactgttgctagtgctctgtggctccgaagagtagcttatacattgaatagcaaactgaaaattcagagagattccaaaaggctaaaacttgggtcagataatagagttcaacattaacagatatatatgtgtaatttgcatttatgtttgaaaaatgaattatataaatacaggctacagcagtggttctcagagtaatccctggttagcagcttctacatcacctgggaacttgttagaaatgcagattcttgggcctccacctcatcctattaaatcagaggctctggggatggggcttagcaatctgtgttaatgagcactccagatgtttctgaagcaggctaacattggagaccactgggctagaaagaccaaccctcctcccttcttgctttgcattatttctttctctttattccacctcattccagaaaggatttggagtggaaaaatctgacttaacaacagtttgtgaataagaacaaaggttttattttacaaaaaaatttctgtgactcaatgatgtgttgtggctgctgccaaaagtaaatagtttgcattaaaagtagtgaccagaacaagggaagcaatagctactcccctcttcacatttgacaggttctgtatatctccatattctgttagaccatatctggagtttgttgaggaactaattttaagaagacattggaaagggttttaacaaggatggtgacacaccttgaacttttgccttaaagggatcagttgagggaagccacctcttgtgactagagcctgacatggaaaagaaagaattttacatcttgctccagagggcgaaaaacaatattggaaagccttctccactggtattaagagggaaagacattagtccaggctcttcctgaagggctttgttaacacacctaagtgcttcaggcttccgttttttgtttgtttgtttgtttgtttttgttttttatttagttggagtcttgctccatcacggaggctggagtgcagtggtgtgttctcggctcaccacaagctccgtctcctgggttcacgccattctcctgcctcagcctcccgagtagctgggattacaggtgccagccaccacgcccggctaattttttgtatttttagtagagacgggatttcaccgtgttagccaggatggtcttgatctcctgacctcataatctgcccacctcagcctcccaaagtgctaggattacagatgtgagccaccgtgcccgacctggtcttctgtttcttttagaatgcagataataagggccatgatgttcatcccacaagatttctgtgaagggctaaaaacatggcaaaaagttcaaatatttgaaaaactacaatggttgtacaaatatgaggcaatggcgctattattaaggaagactagttgatggaaattttaagtccaagataatggagaatctcaacaatatggattgtccaaaagggggacgacctttctcattaaatagtgagttcacggtcatgagaggcctttagacaaagagatgttagagaatgaactgtatgggattgaagcagatggtttcaaagtgccttgccaatgccagtatttcataatgctgaagtgaatgacttgaggtcaggcagatctgagagactcgtgctcacagccagcagagtgaatgtttgattcatcatttgttcatcactacttgcaagtcactgcaaacatttaaaacatttaaatacatttaaacactgaacacacttaaagatatttaatgattaaacatatttaaagcgttaaaaacattaaatgcatttaaaaacaagatgggcccacactaatgaacctggtgtcaatttttctctacagcactatagttaaattccctttgcattagaagtctgattgaatagccccatggtctcctgtggatctgttgatgtatgaatttggaaagtaacattgaattcccaatgctttcttataactctttgcaatgtctcatagacgtgtaagagatgttgcccttagtgtctaacccaagtcctgagttgttttacagcatttttattttaaggttaagatttcttctggctataattttgcatctagacttctacttgttttttcccccctcaaactattgggtaacatcagtgactttcacctttatccactgcccagttggctgctttccaatggcagagaaatgaatggatgcttttgtgtagggagttgtgtaattcaatgaagagcttggagccttgctgaaggcgatatgtgggtatttcacacatattatatctaatgattatatatcagtaatgtaatgaaggtggcattcaaacatcactgtgggtggcagctaagccaaagacagctaaatcttatttttaatacatgagaagcccccttttctaattcaatcagaaacagttgttggtcagttaaagattaaaaaatcagttaaagccagggattagaaaaacataggagagagaaacagaaagagagagatgcaaaccttaaatttttaaaacttaaaacaaatatatatgtatgtacatatggatgtatacatacacattcacatgctgaggctgagttctttttgtgaaaggccaaggacttttctttgacatggatgtgccaattaccaatccatgtcattttgttttgtataaatcacatttatagtgcatcatctacaatttctatttttatttttctgaagtagagatgtttaaggacaattgctgagcaacctgagtgtaggattcttctaactttttatcgtattatttcttctgtagctgtctctctcacacctaaaattagaaaaaaaattattgtgataaaatatacataatataaacattacagtttaaccatcctttaagtatacaagtcagcagcattaagtacattcaccacaatattgtatagccatcaccactatccatttctagaactttttttatcgccagcagaaactctgtacccattaaacaataccttctaattaccttctacacccctactaacctctaacctctattctgcttcttttttttcttcttatttatttattttattattatactttaagttctagggtacatgtgcacaatgtgcaggtttgttacatatgtatacatgtgccatgttggtgtgctgcacccattaacttgtcatttacattaggtatatctcctaatgctatccctcccctctccccccacctcaggacaagccccagtgtgtgatgttccccttcctgtgtccaagtgttctcattgttcaattcccacctatgagtgagaacatgcggtgtttggttttctgtccttgcgatagtttgctgagaatgatggtttctagcttcatccatgtccctacagaagacatgaactcatcctttttttgactgtgtagtattccatggtgtatatgtgccacattttcttaatccagtctatcattgatgggcatttgggttggttccaagtctttgctattgtgaatagtgccgcaataaacattcgtgtgcatgtgtctttatagcagcatgatttataatcctttgggtatatacccagtaatgggatggctgggtcaaatggtatttctacttctagacccttgaggaattgccacactgtcttccacaatggttgaactagtttacagtcccaccaacagtgtaaaagtgttcctatttctccacatcctctccagcacctgttgtttcctgactttttaatgactgccattctaactggtgtgagatggtatctcattgtggttttgatttgcatttctctgatggccagtgatgatgagcattttttcatgtatctgttggctgcataaatgtcttcttttgagaagtgtctgttcatatcctttgcctactttttgatggggttgtttgattttttcttgtaaatttgtttaagttctttgtagattctggatattagccctttgtcagatgggtagattgcaaaaattttctcccattctgtaggttgcctgttcactttgatggtagtttctttttgctgtgcagaagctctttagtttaattagatcccatttgccaattttggcttttgttgccattgcttttggtgttttagacatgaagtccttgcccatgcccatgtcctgaatggtattgcctgggttttcttctagggcttttatggttttaggtctaacatttaagtctttaatccatcttgaattaatttttgtataaggtgtaaggaagggatccaatttcagctttctacatatggctagccagttttcccagcaccatttattaaatagggaatcctttctccatttcttgtttttgtcaggtttgtcaaagatcagatggtcgtagatgtgtggtgttatttctgagggctctgttctgttccattgatctatatctctgttttggtaccagcaccatgcttttttggttactgtagccttgtagtatagtttgaagtcaggtagcatgatgcttccagctttgttcttttggcttaggtttgtcttggcaatgtgggctcttttttggttccatatgaactttaaagtagttttttccaattctgtgaagaaagccactggtagcttgatggggatggcactgaatctataaattaccttgggcagtatggccattttcacgatattgattctccctatccatgagcatcttttttttttttttttttttttttctgagacagagtcttgctctgtcagccaggctggagtgcagtggcacgatctcagctcactgcaacctccgcctcctgggctcaagcaattttcctgcctcagtctcccgagtagctgggattacaggtgtgtgccacaacacccagctaatttttgtatttttaatagagacggggtttcaccatgttggccaggctggtctcaaactcctgacctcaggtaatccacctgccttggcctcccaaagagctgggattacaggcgtgagccactgtgcctggcctattctgctttttatctctatgaatttgcctatttaaagtaccttttgtaagtggaatcacaatatttgtccttctgtgtcagcttatttcacttagcataatcctcagagttcatccatgtcatgtagcatgtgtctgaattttattctttcttatggctgaataatatcttagtggatgagtgtactacattttgtttatgcattcatctcttgatgagtacttgaattttttcccaccttttgactattgtgagtaatgctgctatgaacattgatgtataagtattgcttgagtgccagctttcagttcttttggctatatatcttaagaatggaatttctggatcatggggtaattcaatgtttgcctttttgaggaactagcaaactgttttccaaaaaactttctttcctataggaacttgtctttatgaagactttccaagacagtcaactggctttcggagaagaaacagctctctttacttttggtcctgcatttcatcagtttctagaccatttaattaacttgcataattacaataacaagtccaagtgtcataagcaggtttagaaatgtatatcatttcatgctttctagggaaaaaaagaaatgtataaaattgatatttgttaagcatacaactcaactggtaagagtggaagtgcttggagagtaactttccccaatgatccccagtgtgctttgggcatcagccaatatatattataaaacacagaattaatggagaatgctggttactctggccagttaaggggaggccagttaagagagcttctactattcaactaaattatctttgtcatgataagatacataaagaggccgggcgtggtagctcaagcctgtaatcctagcactttgggaggctgaggtgggtggctcgagaccagcctgggcaacatggcaaaaccccgtctctactaaaaatataaaaaattagccgggcatgggtggcgcacacctgtagtcccagctactccggagtctgaggcgagagaatcacttgaaccctggaggcggaggttgcagtgagccaagatcacaccactgtactccaacctgggtgatagagtgagaccctgtctcaaaaaaaaaaaaagtataaagaaatttagaagcaaatgactcatgaatctagaaaaacaattaacagctacatatccacaactactaacattcaatactcttgttgtttggagacctgagaaagacagacagcaaaggctaaaatagaatgggaagttgactgatctggtcacttcctgtataaacttttgaatgtaagcagcaggttgattttccatgccttcttctcttacagttcaatttagtgtgggtgataaatgggagataaacagaggatagtgaggttgtgcctattcttaggaagaagatacctttcaagttaagattcaagactttacgatgtgattagaaggttttctagatagttctgaagcaaaatcatgaagctgtaggaggaatacttttatatagcatcattcatccttgttagcaacccaaatgattaaaggtttgggaaattacacctttaaatatggtctaaaggaactgggtttatttagtttagagaaagcaagcaagcacgctgagggggacttaatcatagtctccaagaatatgagggatattctctgagtgatggaaagcagctgtttcctgtttccactaaggactggataagaagaatggagttaacatgcaacaagtgggttaagaactctttggccatgaagttcaagacaacaaatccaccagacaaaagtcgctactgtgtttgagaattatgtagctaactaactgtatttcttgggtggtttatatgtggcctgttcatgagtctggagctagtgaaaaagatccagaggacctttcacccaagtgagaggatgagattgtctgttttctgagcctaccagtgctctgtggttgaggaagctcttatcgtagttctcctagtaggatttaaaagagaaaaagcttcagagtctctttgctgctctttggactctttccaagtaagataatctaaatgtactccttttctataaggtggaagatttatatagatttggcattatgtgtcttttctgcttatttggtcgatatggccataatttttaaaaattctgtgtctttagtgaaactggacatatatatacacacatatatacatgtatatgtatgtatatgtcatagacatttgacatgtatatcataagtaattaattcagcaatggagacaatgtttagttctaggtagtatgtctaaatgttagctatgtgaataagataatacactgtgctaattagcagcacagaaatatgcaaagcattttgtaaaaatgcactgttgcagattagctaggggaagaatttagagacaaaacgatgagttctgtgaatgttaccagtttttagtcaatgaggcagatcagaatgcctgaaaactgcttctcaaccattgtttttcttattcctgttccatagtaggttaattataccatttattcagaattagataagtgatgtcttactttcccaactgggagtattttcaaggcaaggtttgattcctaggagatggactgctattaagctgtatctttaaagctgtagctttatgccaacattcattgtgtatacgttccactatcttatattttcatcttgtaccagcatttattttaatcttatttaaaaatctttgcctctgtcattgaatgttttcttgactcaataacttgtttggcctttaaaaatccagcactgaagtgggaaaatgactcgggattgagttggatcatctcttcacacttgttcactgggaggcattgggcaagttagttaacctccttgagtttgcttccttaatctaccctacaggaacattttgaggattaaataaaataaaataatgcatgccaagcccagagcgtagtgtacccagccctcaagtcatgtttatctgctttctttaattcgcaaagaacatttcttacctatcatagagccattgttgcctccacattctcttcttttagtggaggttttggaccacaggggcagatctgtagaataagtcttgtgtaaaattcatgagggcacccaagggtctaattgtatgaatctccttccttttctatatttacttaatccagaaaaaagtctaccattatggcaagtattttaggaagcgtctgttgccaaattacctgaaacaaatcatgtacacacatggaaggaaagtacattttcagatgagtggaaagatgatgcatttttgttttacaaggtttaaaggatagttaataaatcttctagatactgaaataaacatttaatagatattgattcaattgagtgctatggtttgaaacgatatcaaattgaagacatgatccctgacctgggaagttttatgaatttgctggagagaccaagcccataggtatggaatgaccacaaaacagagtagtacaaaaatccggaagagtagtacaaaaatgacagcttgaacccctaagtactgaggaaaggcagcatacagggtttcagtagggatttactatagtagacttagaatcatgatttagttcctaaaaccactatcatttcaaaatagaatttttttaaaaccacctaaaatattcacttcctttcgaaacctaggaacatactacagttgcgctttactcatttgagataaatacacctttcttgaaatgttaactttttctttattttttttgtttttgagaggcaatcccactctgtcacccaggctggagtgcagtaatgccacctcggctcactgcaacctccgtctcccgggttcgggtgattgtcctgcttcagcctcccgagtagctgggattacaggcgcccaccactgtgcctggctaatttttgtgtttagtagagacagggttttaccatgttggccaggctggtcttgaactcctgacttcaagtgatccgtccaactcagcctcccaaagtgctgggattacggtgagccaccacgcccagcctgagataaatacatcttcctaaagcctcagtgtttaggctggtttgctttcagatattcatctatgcaccataccaaactacttctgctgagattcattctgagtctgcaggggatggaatacctttataaatcataacaaatcacattaagagtaaaatatcccagctagggacttacctcaaaagctgaggcatgacacatattttaatggcaatggatttggaaaccaaggttaggaccgttctttctttattagaaggagatttataattcagggcctttgagagtgagcctgggtcctctgaactggacttctcctcttgtcccttcctgtaccccaactccccaaattaaataagtagggaagcagaacaagaaaaccattaacttaatagcatagaatttatggctgaaatcttgcaaagcttatgtcagcaaagtaaaataattactgtcactttcttttagacacttggctttatggttcctgtcacctttatcataacatgcagctgatttagtagctattttttcatggcaaatagcctggtgttgtgtttttatgcatgtgaccatgcaattgagatgacaatgcatggctatactacagtagagctaaatttaggtaatgaattagaacactgttaatagttttggtttagtcatgctgtcagaatgccaactcagccttttctcttgctctttttcccctccagattctcaagtccaaagatttaacatctccaacccagcgctacatcgacagcaaagttgtgaaaacaagagcagaaggcgaatggctctccttcgatgtaactgatgctgttcatgaatggcttcaccataaaggttacaagccactctctcttttcctcccaagatgttcagtatccctaagttactttaaattgattgcagatttaagggtatagacacacatacaaatgacctccttgacttaatgttttccagacaggaacctgggatttaaaataagcttacactgtccctgctgcacttttgtaccatctaataattacatcatcccaaataaaagtgaagaactagaagcaagatttgcaggtaaccaaaacttggtcatatgaggtgggggagggaagggtctatattgataatctcatgggggataaaatcagtttgcatgtgaaaatgagactggtaaggcctggggagtttcattcatttggacagtgatatggttggatatacatatgtgaagggagaaaggattggaagaacggaataggttcccagtttataattctcaatgcccagtgatgacttggtcaataataactgattaactcattaaccctccagtagtaagttaaggcctttgttcttcattgtagcaaaccaactttccatctatactgatattatagagaaagatagaatgtgtttaagaaaattcattgataatcccccaaaccaaatgtcaggaactgacaaccgtatttcacagaagaaaggagtctcctcctgctacagcttccataactaaccttccatgtataagaacattccaccttttctagtccatacccagtatttcaagtgggttccttatcagaattttatattagtttataaacacataaaaatgttttggctttccccacgcttacctttaagtaagttggacaaaagtcatggagagtgaggcgataccaagggctcaagtcacttcatgtattagatgatgagttgttggatgatgagaggtgagaggaaatccatgcctatgtgccgatacagcatctgcccacaatgccaggccagagaattgatttccctgccctcctaacatcacccaggacctccatccacttttagaagactacagcagcccttgctcatggaaaaatactcccagaggtctagagatttatttcagtctctaacctagtcatgattctctggagtgtggagattaaatgcttaaactggcagtctcttgagcatgctttggggagctcaagtttctaaatctcagatggaatcaggaaagtgttgaggatgccataaaataaatgaaaaagccctttcttcacagcttcccaaaatagcattaggtaagggtgacttctgtttcacttgaacctaattcactccaattcagttaagtctcagtttatgttcattaggaaagtcttttgagtttagtagtcttaggaagagtgtgaaccagcgggtgacaaggcatgttctattgccatgtgttcagttgttgagggcttgaacgcagcctaaactgaggattgactaaaataaactgcctagattgcccttggactataggtcaaagactgcttctgtagtgactttcataaccaacagccctggctttgacaccgaactgccttctgacaagagccccatttagaagtgttaattgtcacgtgggttagtcgtagtcctgttgtgccatatctatttccatggggaataactgttgccagctgatgctgctttggtggtcatcactgctatttgtgacaatatacaaaggaaaaaaatatggctgactatatttgatgaaggtgaagctaaatgtttattacccaaatgcattttttcaaggtattgatggcacctccacatataccagtggtgatcagaaaactataaagtccactaggaaaaaaaacagtgggaagaccccacatctcctgctaatgttattgccctcctacagacttgagtcacaacagaccaaccggcggaagaagcgtgctttggatgcggcctattgctttaggtaaaggaaagaaaagtaaaaccaagtaattgcatctgttaactcttaaactgcctttgccctttcttttactgtgtattgacccaagtggaactcactgctaaggccagatagagtgcagtacagctcctgtgtctcataataccattcttcccagaggcttatattcatcaggtctttagcagtgaaccaagtgtgaagggagaaaactaaccccctgaattttttccccaaaattcctctgaagttctttggtgctgaagaagaaaacaagctctctgctcctcagaacaaataaaagcttatttgaggtgtgtgatgtcaactccttaattaagaaagacccaccatctggatgatgccttcatcctcaccaagtccaagtgctgatagtcacacttctttcatagtaacagagatgagacagcagaagaatgccgtgtgtcacacctttagcaacagcatatgagagaagcaagaagaatttatttcccattcccacatgagtgcatggagggagaatgtgaatgttcttatgtggtctcagtaagaggagggctctttccttattttgagaggtacaggacagggaagggtcctcactgatgaagtgctcaaaatgtcagaggccatgagtaaagtggcactttttggttgccagatccagtggttgccctcagcaagactccatgtttcttgatctctggttcattcctagatcagagaacatgtggtgaaacaaaggatcaattctcaaaggaaaacgccttagatggttgtttgaaaattgctgttgtacttctttcattttatatttgaaagggcaatagaggctggatggcagaactgcccagtgttgattggaaagggcttcatcatgcccagccactctctgcttatatctggtcatctgaaggtaaatgtatgattttccaggtcacagacaaggaagtcagggtatagaactcataagggcaagtagtccagcaaatcaccaccacatacaacaccctatcatgaaagtcacttgagattacaataaagccattaaaacctggcccatgatatttgctcattagatgtttgttgaataaatgaatgaatcatttttctggtttggggtgaggtggtggtagagtgagggtggtgaatcagctttaaaatctccattgctttttttttttttttttaacagaaatgtgcaggataattgctgcctacgtccactttacattgatttcaagagggatctagggtggaaatggatacacgaacccaaagggtacaatgccaacttctgtgctggagcatgcccgtatttatggagttcagacactcagcacagcagggtgagtgttcagcttacctgttgcctctgttcttgggttaccatgtgcacctgctgatagtatttccaaatgagttgtaattaacctcgtgctgtcttaccatcacacatgtatgggtactggagaaaaatctttcattaggttggtgcaaaagtattcgcagtttttgccattgaaaataatggcaagaaactcccctaatagatgaggaggaagaatgttaactgtaggtgaaatcagaaagtgacactgatcggttacaaaccataagtctcacctgcccagttattaacaactggagggaagttttgtttacttttttctttattttatattctttttcaaaaacaatttttattgatacataattgcatatattaatgaggtacatgtgatattttgatacatgtatacaatgtgtaatgatgaaatcagggtaattaggatatccattgcctcaaaaatttatcatttcctcatttggggaacattccagatcatctcttctagttactttaaaatagacaataaattattgttaactatagtaaccctactgtgctataaaacattagaatttattccttctatctaactgtattttcatacctattaatcaacttctcttcacccttaccctgttcccagcctctggtaaccatcattctactctctgcctccataagttttatattcttaacagctataagcataaatagccaagaaaacaccctttttagaatcaatatgtcacatagtatcatatatagataaagtgtgaagggacccaggtctccatctaaaaaaaaaatctgctatcatctccatcagagactgttatattagaaagaacattggggatttcagttaatgcctgggagtgtgtgattattagtaaatacactatcaatttactaatgtatgacagaatgtaatttaacatctctaaacctcagtttcttatcagtaagaaggaatgtctgtattaaaagttatctttaaaataataatgccaaactcaagagttgatatgaagtacaaaagatgatatacatgaaaatgacttgaaaattcgtttctctactttttttttaatgtaacacaaagtaaatgagaatctgagtattttatcaagttgtttcaatgaagacagagttgattcagaaggtaattcccagattggatggtatgagtttccggcaagattagagaagagtttttctatgtaataatgatatttgttcacatgcttcctcttgatggctcatcaggattttagagatagaaaggacatcttatccaacgctttcattttcttaaagaaattggggaccgggcgcagtgactcatgcctgtatttccagcacttcgggaggccgaggcaggtggatcacgaggtcaggagttcaagaccagcctggtcaagatgatgaaaccccgtctctactaaaaatacaaaaaaattaaccaggcatggtggcgggtgcctgcaatcccagctactcgggaggttgaggcagagaatcgcttgaacccaggaggcggaggttgcagtgagccgagatcgcaccactgcactccagcctgggtggcagagtgagatcctgtctcaaaaaaaaaaaaaaaaaaaagaaattggggtctagatcatgtagtctagatgatacccaaaaccaaacagaaaattagtgacaaaccaaggcttggcatgcaggcctccttgttttataaccaggcctccatttgctctatcttagtgggtttaattcctaaaatatggttacacgttagggtttctattctgctctttatgcctctgtaaatctccctattaaagaagcattagaaaaattgccttcactgcagggtaggaaaatggatcagctgccaaaaaagatcacatactacattcagctgaattcatgagtttgggggttatcaattattttagacaatctgtattataaaaattcctctttagttcatatgaaaactcatgtgttcagggagcataaagtatatttatttataaatacctacatatgctggaatttaaattgacaaatacggctcctcttccttcagctgttttcccaactcccctgtagactttggcactcgggggcgaccgtgtgcttggccatgtgagggaagcttgctcatgcctgtccctttgtctgagctctctggccaggctgcctcctctgggctgcggcagcagtagctgtaatgtgggcaaggccctgttgccaagtagaaacataattctcctctctgatacacagagggagtgtgtgaaggctgagaccatgcttgtttttcaaggagagaggaagaataactgtcatggtcacaaatatgtggtttggacagttacccaagaagccagaggtagcttaataaagtagtcagtgttgctgtgctgaacagatcttctgtcttaggctgaaaaaattgcagtgaatctcgaggaaaaggtcacttgctgtttgactaacacattaatggcatccttggaaatgtctctgtatcatcagtggggaacctacatacttccattagtaaaagtctcacacccctctgatacagaatggggttgaaggtgtaaggctaattatagaaccgtctcttcattctgttttcagacttgccattaactcctccaactcagcaactaccatttaccgcataggttagtggagggttgattatgattgtgattatgattatgatcgttttaagcaaaatgtaagaaagtgaataattatttcttataggagatcttagagatcacttttatgtcatttctagcatcactgtgtttatgaagcaatggtaaaaaaacaggcttttttttttttaatgaaaattgaggataccttaaattggcctgaggagacacttaacgtagaaagatttcatttccttccttccttatttatttatttaaagaaacagggtctgggtctgttgtccaagctggtcctgaactcctacactcaagtgatccttcaaagtgttgggattacaggcgtgagccaccgtgcccagcctgtagaaagatttcacattgcatacaggtgtctttttctatacccaaaggtagattaaagctcttatgagagctttgataaaactttttattcttctacttattcatgtattcatttcttcacttagtacatgaatctcattttgtccagagaagacttactagggccacaagataaaagcaaagtctgtagagttcctgatctggagggagctcttaatctagatgggattgaaatgtatactcaagaaacaacttcatttacagagtagtgtagaaataagaccaaatgctataaggatcaagttttgtggggacctaggatgtatgtgcagccaagcactgatcagaggaaagacttactggaaaaaccgggaaaatctgttgaatgagcaattttttccaatctgactcttacagaatcatttgcttaagatgtgtggaaaacgagttccgtgtgggaaaataatgactttggtgattgctaaggtcacatatcagtttgactgtaatttaggaaattagcaaccaaaaataattttaaattgcctactcagtgctgtgactgctaacaatgtggaattctttttaaaaacgaattgcgttcattttccgtctttccctatgttgtctctcctctcctgtgtcctttcaggtcctgagcttatataataccataaatccagaagcatctgcttctccttgctgcgtgtcccaagatttagaacctctaaccattctctactacattggcaaaacacccaagattgaacagctttctaatatgattgtaaagtcttgcaaatgcagctaaaattcttggaaaagtggcaagaccaaaatgacaatgatgatgataatgatgatgacgacgacaacgatgatgcttgtaacaagaaaacataagagagccttggttcatcagtgttaaaaaatttttgaaaaggcggtactagttcagacactttggaagtttgtgttctgtttgttaaaactggcatctgacacaaaaaaagttgaaggccttattctacatttcacctactttgtaagtgagagagacaagaagcaaattttttttaaagaaaaaaataaacactggaagaatttattagtgttaattatgtgaacaacgacaacaacaacaacaacaacaaacaggaaaatcccattaagtggagttgctgtacgtaccgttcctatcccgcgcctcacttgatttttctgtattgctatgcaataggcacccttcccattcttactcttagagttaacagtgagttatttattgtgtgttactatataatgaacgtttcattgcccttggaaaataaaacaggtgtataaagtggagaccaaatactttgccagaaactcatggatggcttaaggaacttgaactcaaacgagccagaaaaaaagaggtcatattaatgggatgaaaacccaagtgagttattatatgaccgagaaagtctgcattaagataaagaccctgaaaacacatgttatgtatcagctgcctaaggaagcttcttgtaaggtccaaaaactaaaaagactgttaataaaagaaactttcagtcagaataagtctgtaagtttttttttttctttttaattgtaaatggttctttgtcagtttagtaaaccagtgaaatgttgaaatgttttgacatgtactggtcaaacttcagaccttaaaatattgctgtatagctatgctataggttttttcctttgttttggtatatgtaaccatacctatattattaaaatagatggatatagaagccagcataattgaaaacacatctgcagatctcttttgcaaactattaaatcaaaacattaactactttatgtgtaatgtgtaaatttttaccatattttttatattctgtaataatgtcaactatgatttagattgacttaaatttgggctctttttaatgatcactcacaaatgtatgtttcttttagctggccagtacttttgagtaaagcccctatagtttgacttgcactacaaatgcattttttttttaataacatttgccctacttgtgctttgtgtttctttcattattatgacataagctacctgggtccacttgtcttttcttttttttgtttcacagaaaagatgggttcgagttcagtggtcttcatcttccaagcatcattactaaccaagtcagacgttaacaaatttttatgttaggaaaaggaggaatgttatagatacatagaaaattgaagtaaaatgttttcattttagcaaggatttagggttctaactaaaactcagaatctttattgagttaagaaaagtttctctaccttggtttaatcaatatttttgtaaaatcctattgttattacaaagaggacacttcataggaaacatctttttctttagtcaggtttttaatattcagggggaaattgaaagatatatattttagtcgatttttcaaaaggggaaaaaagtccaggtcagcataagtcattttgtgtatttcactgaagttataaggtttttataaatgttctttgaaggggaaaaggcacaagccaatttttcctatgatcaaaaaattctttctttcctctgagtgagagttatctatatctgaggctaaagtttaccttgctttaataaataatttgccacatcattgcagaagaggtatcctcatgctggggttaatagaatatgtcagtttatcacttgtcgcttatttagctttaaaataaaaattaataggcaaagcaatggaatatttgcagtttcacctaaagagcagcataaggaggcgggaatccaaagtgaagttgtttgatatggtctacttcttttttggaatttcctgaccattaattaaagaattggatttgcaagtttgaaaactggaaaagcaagagatgggatgccataatagtaaacagcccttgtgttggatgtaacccaatcccagatttgagtgtgtgttgattatttttttgtcttccacttttctattatgtgtaaatcacttttatttctgcagacattttcctctcagataggatgacattttgttttgtattattttgtctttcctcatgaatgcactgataatattttaaatgctctattttaagatctcttgaatctgttttttttttttttaatttgggggttctgtaaggtctttatttcccataagtaaatattgccatgggaggggggtggaggtggcaaggaaggggtgaagtgctagtatgcaagtgggcagcaattatttttgtgttaatcagcagtacaatttgatcgttggcatggttaaaaaatggaatataagattagctgttttgtattttgatgaccaattacgctgtattttaacacgatgtatgtctgtttttgtggtgctctagtggtaaataaattatttcgatgatatgtggatgtctttttcctatcagtaccatcatcgagtctagaaaacacctgtgatgcaataagactatctcaagctggaaaagtcataccacctttccgattgccctctgtgctttctcccttaaggacagtcacttcagaagtcatgctttaaagcacaagagtcaggccatatccatcaaggatagaagaaatccctgtgccgtctttttattcccttatttattgctatttggtaattgtttgagatttagtttccatccagcttgactgccgaccagaaaaaatgcagagagatgtttgcaccatgctttggctttctggttctatgttctgccaacgccagggccaaaagaactggtctagacagtatcccctgtagccccataacttggatagttgctgagccagccagatataacaagagccacgtgctttctggggttggttgtttgggatcagctacttgcctgtcagtttcactggtaccactgcaccacaaacaaaaaaacccaccctatttcctccaatttttttggctgctacctacaagaccagactcctcaaacgagttgccaatctcttaataaataggattaataaaaaaagtaattgtgactcaa

SEQ ID NO: 51 - DNA, 23926 bp, Homo sapiens
  source 1..23926: mol_type = genomic DNA
aaaatttcagcagagagaaatagagaaagcagtgtgtgtgcatgtgtgtgtgtgtgagagagagagggagaggagcgagagggagagggagagggagagagagaaagggagggaagcagagagtcaagtccaagggaatgagcgagagaggcagagacaggggaagaggcgtgcgagagaaggaataacagctttccggagcaggcgtgccgtgaactggcttctattttattttatttttttctcctttttattttttaaagagaagcaggggacagaagcaatggccgaggcagaagacaagccgaggtgctggtgaccctgggcgtctgagtggatgattggggctgctgcgctcagaggcctgcctccctgccttccaatgcatataaccccacaccccagccaatgaagacgagaggcagcgtgaacaaagtcatttagaaagcccccgaggaagtgtaaacaaaagagaaagcatgaatggagtgcctgagagacaagtgtgtcctgtactgcccccacctttagctgggccagcaactgcccggccctgcttctccccacctactcactggtgatctttttttttttacttttttttcccttttcttttccattctcttttcttattttctttcaaggcaaggcaaggattttgattttgggacccagccatggtccttctgcttcttctttaaaatacccactttctccccatcgccaagcggcgtttggcaatatcagatatccactctatttatttttacctaaggaaaaactccagctcccttcccactcccagctgccttgccacccctcccagccctctgcttgccctccacctggcctgctgggagtcagagcccagcaaaacctgtttagacacatggacaagaatcccagcgctacaaggcacacagtccgcttcttcgtcctcagggttgccagcgcttcctggaagtcctgaagctctcgcagtgcagtgagttcatgcaccttcttgccaagcctcagtctttgggatctggggaggccgcctggttttcctccctccttctgcacgtctgctggggtctcttcctctccaggccttgccgtccccctggcctctcttcccagctcacacatgaagatgcacttgcaaagggctctggtggtcctggccctgctgaactttgccacggtcagcctctctctgtccacttgcaccaccttggacttcggccacatcaagaagaagagggtggaagccattaggggacagatcttgagcaagctcaggctcaccagcccccctgagccaacggtgatgacccacgtcccctatcaggtcctggccctttacaacagcacccgggagctgctggaggagatgcatggggagagggaggaaggctgcacccaggaaaacaccgagtcggaatactatgccaaagaaatccataaattcgacatgatccaggggctggcggagcacagtaagtccaaattctcgctggggtgtctgctctggagggtctgaactggagctgggagctctgcagaggggggcctagtgctggccacacagcagggtgccccaggattcaccagcaccaaggctcaggatgtgcgatgctcctccgttggggctggggaggtgggtggggaaggagatagagccattctgttaagagccggcgcttctgggaggccaggagccctggagctgagtggcttgctgaattcacatcacatccttgactgattttaatttggaattacattgtgctgtccagggaaacatatgtattcttgcacatgcgatcgtatcagtaactgtaagcatctgggtgccataaaggggaaggccggctctgtcaggagcccttacggttctcagtgtggagacctcatcttctccctgcttttcacaactcattgtgacacgtctccgtttcagtttttccagttcttgggaagaagaatacctgccccaaattaatgtctgtcaagctttttgaagcccaggcaggagacagcttcttgctgcctgggccctttggtctaccccacccacgtgacccacgagacccacgtgagctgtgtgtgtggaaggaagagggtatgcacgaatgttcccagggccgtgtactttagggtgacatgcagtcttgtgcagtagacagattcatgtgctcaaaatgggcgccctccaggccggtgggcacggggagagcgggttttggctgtggatgcgtagaggaggctggcgccctttgtgtctgcgtgtcacgggagagcgggtggaggggtggcagtgggtgcatggtgggggggggggatatgtctgggagcctgccgtcccaggaggctctgtctgcatggaggagccgggcggcttctgggcgagatgtctgtgtgtgttggtacacgtgtggaagtcatatgtgtttactgaaggggattttaaaaacctcaatacaagagagagaaatttggcagatgttgagaaactgacagcccaggaaagaggaatgtgagccactcgtgggccgtagactccgggagcagctctgtttgcttttcctaccagcaggtgtcctcgccgccctgactacctcagcccaggcccacctgggaggtgggcagctcctggagtggggtggagggcatgggatggagctggcaggcaggggagggtggtcagcagagcacacagcaaggggtgaaaggaacctggctggagagaaggaacaggagtgggtaccgatgggtggaccagctctggctggaggtgcaaaggccccgttcacggctccacgccaggcagaggagcctgtggttactggcgaggggttcccgctccagcttcctgtggctgcctggagcgcctttcttcaggatgtggctgccatgtggggcggaggctggaggccgatgcagagctactactccctgcccagggtctctgggtggggctggctcagagacccacagttcccagaggcacctagcagctcgatggccaaggctccaactccctgggaacccaccaacgcgggagatagtgaccacaagcatcagaggaaggtcgaaatctgaggccggcaggagaggtgtgaggagagtccagggcaagagggcaggactcagaccttcatggtctgggtcagcaggaggagtccaagggaggaagcattctgagtcaccaggacccccccatcccggaatcctgagctgagaatgaatgagccacgtggaggcaaggccatgcaggtgcaagtggacactgattttgtgcagactcaaagcacaaatagcagatgtccttgggaaaagcccgggcagggccccatagatgctgggcagcttccaggctgcagtaccaagaccttacaactgcaacagatgggtggatgtggggttatggagcaatggtctggcctggggcaacccagcacagtgagcaggatgctgttcaggatgctggggaggagccaacgtgcgatgctatgaggctcacaggtacaaaccggaagcaggcagactctgcagctgttggaggtgacttggaggctgagcagacggacctgggcccgccctgcagctggtcgggtgctgagcccaccccagagaggcagacacacaaggcacactaactataaagaaggcagtgggcaggtgctgagcaggagcagagagccatcatcaggggcttgcaaggcggcggggcggggtgggggaaggaagcctgtctttaactcatgagggcagacaggggtgacaccaggtctgtggtggggcacagcagggtctcaatgccagagcctctgctgggaggtcatgagatcacgttctgttccatatttcctcacttctggccacttccctgacccagtgaacatgcattcaaaggaaagtgacagtaggagccagggcaaggagatagaggtccctggagaggaaaatgaaagaggaaatactttttagtagtgcaggagaaagggcaccaaggtgagagcagagaggaaggccttttcctaaataaccttttctccctgttttacagataaggaaactgagacctggattgcttaagtaatttgtccaaaaagagcagggaccctaacctagacattctgtgtgcaggacgcatgtagttaagcactcatttatatgtaaaatacacgttgtaagtgttacctttaacctcctttaacctttagggttcagtagaactttgatttataacataaatgaatcatgtgttggaccaagcaggagaggtcagagttattatcttagtaacccaggtggcagattgcacaatgataactggatttgttcttccttagctctgcatttttttttttttttttttgcccgggagattcatactgccacaaatgttctccctaatttaatgaaggagttttctttatttaatgaagagtctcaagcaggttaagcaaccgcagctacgtaaaagtgacctctctgagcctcagtttccccagctgtaaagttagagatgatttccaaactccttttcagctgaaagaattttataattccatctgggatgaatcagcagagcctctattggggagtatgggcaagactctgtaatcctttttctaattctccaggattttactgtcgggagggagtagagagtttctctgaccccatgtgatgggaaaggacacagcttttttacttccgttgtcatccctcttacaaaggtatcaccaatgtaggtgtcattttatcttctggcttgtaattatctgtctctgttcggagacttgttgttttcagccaagggcagcgctaagacaaccagcaaacccagagtttctcagcaaagagaaaactctatattttagtctttgttctctagctgctaagtgtagattttgtttattctgagaattattctgaaaatcatttgctccaagggccaatgccctctgcacagtagaggtcagcacttctccaagtgtggtccagaggaagctggaggtaaatgtagattccctggtcccacccacccttatagaatcagaatcttgagggggtggagtcttggggaacctgtattttcgacaagctccttatggattcttaagcacattgaagcttaagagtcagtgaactagggcgaaacttttcttagagggatggcaaacacaagtgcctacagagacccggcaggaaatgcaaatgatctggaagaaaagccacggcgtcatgataaactgcaccaggacacttggtcttggggtcaagaagaaagtagggtgtgtgagacagggagagggaggggacctggagcccacgtgcccagccaaagcagcagccagcctcagttcttgctgggttttgcattgaggactgtgggtccagcttgattagttcttcccgtgtcccagaaaagcagaaaatctggatctttctgtgaagtgttccaatttttaacatgggcttaaaatgtttatgggcttctaactcaaaatttttaaaggtgttccatcagcgaaacaacatgtctaattcatttaacggttaatcaatagaaagctcacaccattaaagcagtggtttctcaaacttccagaacatctagaagccatggtgccctttgcaacacattataatctgtggttctcaaccctggctgcacgttagaatcatctggagatcttgaaaaaaatatgccgtggaccccactcactccagtgtagtcagaactgctggggaatgggtccaggaatcatttgtttttaaagctttccaggtgattctaatgtgcagccagggtagagaagtacagccacactgataaatatagtcccttcactagaaccagcagaaatgatatatacaagcaaaggcacacctagccacccaggtgtctgaacacattttaaaaggcagttaactaaacatggtcagctatttcctggtttttccatgcatactgtacatgaatattctttgcttatgttttgccccgttaaacaaaatagagaaaatggcattcaccaatatatattttttctgtgcaatggaaaaagttgctcaagatttaatttgtaaaggtgggaccccctagtccagctctcaataatactagtgttctgtgaggcatggcttaagaaccacaaactcgtttgcagtgggtcattgtctgaggcataggttgacactctaggcccatttagtggaatcttgccatattttgttgatgaaaccatcttcaccagatgatctcccagatccctcccagcttgaagagtctctgcttcaataaatgaggtatgttcagaagacctgggttcaaaccccacctccaccaccttctagttatgtgaccttgggaaagacatttaactttttgaggctcagttttctcatttgtcaagtgataaattttacatgttttcattcttctcaggggttgttagaaggtcacatgaagtaataaaaactcgacaaaacaaggtggtgctattacattttgcttatttatgtatacgatgattcattccacagattacttaaaacatcattattcagtgaatttgattgtcaagaagattgtatgtacattttctttgatctcccaggcaattcttttttttaattaattttaattttaatttttttgacagagtctcactctgtcacccagcctggagtgcactggtgcaatctcggctcactgtagcttctgccttctgggttcaagtgattctcatgcctcagcctcccgagtagctggggttacaggtgcccaccaccacacccagctaatttttgtatttggagtagagatggggttttgccatgttggccaggctggtctcgaactcctgacctccagtgatccacctgcctcggcctcccaaagtgctgggattacaggcatgagccactgttctcggcctttaaaatttttaattttaaataatagggataggtcctccctatgttgtccaggctgatcttgaactcctgggctcaagcaatcctcccgcctcagcctcccgagtagctgaaataacagacatgtgctaccatgcccagctaattttcgtattttttatagagatggggtttcaccatgttggccaggctggtctcaaacacctgagctcaagcaatccacccacctcagcctcccaaggtgctggctgggattacaggcgtgagccaccatgcctggctgccaattcttcttcttcttcttctttttttttttttttttgagatggagtctcactctgttgcccaggctggagtgcagtgacacaatctcagctcactgcaacctcgacctcccaggttcaagtgactctcctgcctcagcctcctgaatagctaggattacaagcatgcaccatcatgcctggctaatttttgtatttttagtagagacggggtttcaccttgttgcccaggtgccaattcttttttaatcactagcaattgtgtcctaagctttgcttgctagtgtcaagttgcttgtgtcagctaacttctgagtgactctggccaagaccctctagacagccatttcttcctctgaagagggttgcgccacatgactcctgatgtcccttctaatcatgggaaatctatatatcccagtaatagaaaaatgacctttcccacctctttcttgaaaccttaaaattctccccaggatgtgttcatcctggggagcagattatgattgataggctggaagaaaccaaagaggacggccactagggtgtcctgagaactctcttagctcataactttccccatctcctggcttcccactgccttgacccactctgactgtctcaccagcaagtgccattttccatctcccttcttttttttctgagatggagtctcactctgttgcccaggttggagtgcaatggcaccacctcagctcattgcaacctctgcctcctgggttcaagcgattctcctgcctcaacctcctcagtagctgggattacaggcacgcaccaccaggcctggctaattttcatatttttagtagagacagggtttcaccatgttggtcaggctggtctcaaactcctgatgtcgtgatctgcccacctcggcttcccgaagtgctgggattacaggcgtgagccaccgtgcccggccccatctcccttctttttacagcaaggtgcatgttgcactgacttaccctttattcctcttgtagtcactggagctgtgttatttatttactttattaatttatttatttacttgaaacagagtctccctctgttgcccaggctggagtgcagtggcacaatcctggctcactgcaatctggacctcccgagctcaagtgatcctcccagcaggtgctattgtaactgaagccatatcaataacagctccttcaaaacccagctctgttgtccttgatagggttgccaatgcaagtagcttatccacattcagagtattacaaacttgtaaacttacacattacttaactatcactgatttctctccttggttctatctgaaatggtttagggaatcgttggcagtatctgttctttcaaagccaattattaatcagggcttcattagacagcattcacacatttgttttcctaacatctgttccattaattttctaagaaccagcgtcaggcccaccagatggcaatttccagaaacactcactcatcctttcctgaagatcagtagcgcatttgcttgtttccaggcctctgatccttcctgccttgtctgtgacttcctcaacaacccctcggggtgattataagctcattccagccatgtccattatgtgtggaatctgggtctatgagcttgaatttcaacttcgggctattgttaccatttgtgcagaaagtttttctctgggtgttaatactgctcagaccttgaggctgtcaagtgtacaggagcagagaaaagacaggctctttctctttctctggctcagaggggtgggaaagagcattcgctgcccacatcttgtggacagggatgaagaggccagcaggtgacagcgtctggcatagcacgtgctgtcaaggaaagagaaaggagccaatggtgacacaccagcttggtcagaggaagcatctgtgtttctgccaggctcatgatgtgggctctttgctatataagccctgctttattgggtctaaaacacaaggttgagatgtcactgcactgctcaaacactttcagtgactccctactgttaatgggttaaaatttaaccttttagtctgacaggtggaccccaatctatcatcttgccctttctcacctggctcccacctgctgtttcgggcccctcttactcatttgcatttcctcccctccctgcctttgcttccagcagtcactccatgtaacatttctttcctccccatcctcaaatcctctcaattttcaccccttccgtgaagtgctccttgccatttccctcctttgatttcctgcagcaactcctggacttctctgaaaaccactggtttcctgtcgctcccctcacctgtgctcctgcattgtgacatcttccggggcactctgtcctattatttctctctagtcctgttatttgggcccatgtattaatacccccccttagatattaacccataagcctgaggctgcacttttttgaattttgaaatcagaccttggccttgaccttgagcagcaggatataaataactcttacatgcttagcgttccaataatggaacaccaggcataaatgggttttaatccccttgaaggcaggggttgtgtctactcatgttttgcttcccaaggttagcactatgcttggcatatagtagctgctcaatacatctttgataaatgaatgaatgcccagatgaacaaacacacgaataaatcaactagctgtaagatatgtaaactactaggtgctgatatctttctagaatcagtattttctcaaaaagtaggaaaaacgggttggaaaacttaccagaactgagatgtcaaggcagtgggaggagggggcaattagatttgactggccagtctagtgccatgttgtggagctctgaggccacactgctccttgctcaggactgtgtgtgattctagggccaccaagaatcttcctcgtatctccaccttgcggtctgaggcctcaagcctctagggaggtggcaggcgggacggtggccacttggtgcctgtccgttggcagcacactgttcctgcatgtctcgctcatgctgtgccctctgctctgctttatctcctagacgaactggctgtctgccctaaaggaattacctccaaggttttccgcttcaatgtgtcctcagtggagaaaaatagaaccaacctattccgagcagaattccgggtcttgcgggtgcccaaccccagctctaagcggaatgagcagaggatcgagctcttccaggtaactcctctctcagagcagaaaccacaccgacgggaaagctggttcctttgccatatcagggcaccactgggtgcagcgtttggcagacctgggtttgaatcctggcttctctgagccttcgtttccgtatctgtgtctgtcattaaaacacttaagagttagctaaggtgctcgagggccatggcattcaggaaccactggtttcctatcgctccctcacctgtgctctgcattgtgacatcttctggggcactctgtcctggtctcgggtactcactcctttctctgccctgtagatccttcggccagatgagcacattgccaaacagcgctatatcggtggcaagaatctgcccacacggggcactgccgagtggctgtcctttgatgtcactgacactgtgcgtgagtggctgttgagaagaggtaggtggacccttcagataagcatttcagaatgaacctcaggtcccttagtcctccatgaaatggagggaagaggacagaattaagggagtcagagatctgggttcaaaccctagctttgccactgagtatcctccattcattcactcaactaatgtttattaaatgctcactgtaagacaggccctggggatgcagccacagggataggaactatgagaaatagaaagagggcaatgtgacaatgagtgggtggagtccaacagggaaggtctctatgatgaagaaattcatgcattgacatctgaatgataaggatttagcccatgaagatcagaataagggatgtgctaagcaaaggcaacagggaggcccaggccctcaagtggaaataagcttgatttgttctagcagcagcagcaaacagatcggtgtggctggagcatggtgagctggggaggggaagaggaggggaggtggtcagggaggttgctggggccatataatttattattactattattattattattattattattattattattattattattatttcttgagactgagtctcgctctgttgcctaagctggagtgcagtggtgcgatctctgctcactgcacctccaccatctgggttcaagcgattctcacgtctcagtctcctgaatagctgggactacaggtgcacgctgccacacctggctaatttttttgtatttttagtaaagatggggtttcaccatgttggccaggctggtctcgaactcctgacctcaagtgatccgcccactttggcttccaaaagtgctgggattatagatgtgagccagcatgcccagccaatttaatttagaacatcatcaggtcatggcgaggtttcaggacttattccaggtgtgatgagaagtgtgggagtgctataaccagagctggggatactcaagatacccaggaattccttcctgtccctctactgggtgtgaagtcaagagcctaggagaacccacgtggatctgccaacggcagctctgttgggaattctgactcagacagctacagggaggaggggctgggtgaggtgatttgattgacatctttaaaagatccctctagtttccaggaggtcaagggaagaggcaggaaaatgagttaggagccacggcggcagcccagatgagagcaatatctaggccgagactagggcggtagcagtggatatgacgatcagatggatttgttctgtattttgaaggtagccagtagcacaggctgattaggtatgggatgtgaggacacaagagcattccagataacttctaaattttttcgacatccaggtggtatcacttattgaaatagggggcctaggagaagaacaggttctgttctgcccagttaagtttaaaaggccgggtcgtcatgcaagtagagctatcctggaggcatatcaaacttcacatgtcccaaatatcttacccacacactgccttcacctggaaaatcaggcaatggttcctcctctatgtatgcctcacagagctgttttaaggatcaaatgtatttgagagaacttcatggtttttaccatgttttacaagagtaagcttttcttattttagataaggaaacaggccgagagaagttaagtgacttgaccgaggtcgtccagtctggattagaactttggtgtctcatgacaccatcctctgtgtttctttcccttttcttggctggtactgcctggtctgatgctcagtgggttggggtcacagatggcagtcccatctgttccttctcttcctcttgggcaaggttttctcctgtcatcagctgctataaagccacagaccatccacatattgatgcccagagtccctgaggcaggtggatccttctaagtccttggtgttttaggcaactaagagttaaagctcaaaggcagagcttacaaactatttggcctgcacattgttttcgatttgactagtcatcaacagttttgggtgttttaagtcaggagatttcacataaaacctggacttcttgctgtttttgaaaaatcgaaagatttcctgataaccatccgtcagagatgagtaccggccaccccttgagatggggtatgcatcctcagtccccgcagcccccaccattccctattgttccccaagagtgaggctggcagttcctgtttagcatcatgtgctggctcgattttctcacttacgtgacctgcctgggctcggtagccatcgagtttgcattgcttgatgccacggagcccaggcaagtcacataaatgagaaaattccccatccaaggggaattatccagtggctgagttggcagatggtgggctgaagatcctgccccagtcccaagggtacccaggaatttcatcctgtccctcctactgagcatgaaggcaagagcctaggagaacccacgtggatctgccgacagcagctctgttgggaattctgactcagacggctacagaaaggaggggctggggaaattaatctcttaacttccctgtctgattttgatcagctccacctggatttctttgaagccctgggcacttgaaggagttcttattttcacagctgcagaactcaatgagaagtttgcattgagaatgatttccatcctcctgagacatcaaaaagataatttcgtaataaaacctatgggtcccccacccaccacccccacagctgccaattctgaggttagttcttcattggaaccttcagttcacacttaggcagatactgcccacctttcccacaggggaatcatcacacaggtttgtacttacagagagcccatgagtctcttcagagttcatggcttcaaaccaggcaacaaaggactccaaattggagcagttggcggtgtagattgatgagaaaactgagtcacacatgtggtcttggattcattcagcaaacatctgagagcccttgtgcaccaggtacccaggctgcattctgggtcgcagagtgggttggagtccacaagggccgctggggacccaggtctcatacccttgtgctattgctcatatagtctgcagcacctagctaggcagggccaggcctcccctagtaggctggggagggagcctctcagcatcatggctcaggaaaggtgggacactgggaaacaaccatcttgcatgttggtgaatgtgtgggcatcttccttggtggtctctgttgccccctctttacccctccttgtctctaacaagagtttgggatctggcatcaagctgtcagtgcttgaatcctggcactactatccactggttggatatcttgggcaagctgtttaatctccctaagcctcagtgttcttatctgtacaatgggggataatagttcttgctctatgggattattatagagatagaataagttagtgattgttgtcatcatctctaagtcctctatctggatacagcctgttggccaagccaggccaccctcttgtgcttacatcctggaccctcactctccccaacacagctgtctgcaccttgactttctaactcacagaatcatggaactcactcactccaggtctcttccagcctgccttgaaccagcttgaccaggaggtacactgtgttgttaggtagcccatttcagctactttggctcctccttccagctgccttaacccagggagagggcaatcctcatacctccctctccattcacttctcctccagctgggtctcagctgccttgttttattggtctgccttccctcactgagcgaacctgctggaacagagatcttcaagctcagcaggcgcagtgtgcctcagaggttgccctgacttagggtagagcagatctggttaggctctggagtttatggaagaaaggagctgggttttaaccagtaggactgggatgtccaagccaacctaatgttgatgggaatctccagtcttgtaggcttgtatccttctgtctatgagaaggttgctgggccaggttggactttttggggtttgccctgatggcacaatttcaggaagactccaggttgtctccaaggccagatgctcacacacatggtgtgtggcctcagggagcagcaaatcaatcaactcatcgagaggctgaccctgaatccagagaggtccatcccccatgacctctcctacacctggccacaactggctgctatcccaggatcaacagagcttcccaaattaagtcttacccaccagaattgacatgataccagatcctacctggttttctgtgtaaaactacttgtctcagtgcagacttttcattttctttctttttccttcacttcactcaacctcatttactgagttcctgcttccttgattttggttgccaaaacatgtgatcccacaactactaggcgaatgggctggagttgcccttcacgcaccagaatgtcaggcaccaaaccctggcacctccaggcttcatcatgctcactgtctccgtgctcaagtcatctggaccctcagccatagttctctatcatctcctctgtgctgttttctaagttcacaactgtcttcccaagctgttcatcttggtgagcaatccacattccaacttcccatcatggtgaacaaggattcccaaagaagaaatgtccaagtaatttttacctcgttgtgtccttgttccttaggaaaaatatggcccagtgtaaccgtgatcttcatcttatctcttctagaatctgccactttgtctaggcccacagtcatggccctggtagaaatgcttgcatcttccactgagacggattctgcttcctgtttgcaagtgaccttgcctctagcattggttcctgacttgaatctttttgccagcattacatcctgtggctttttgaatttgtggccttttgaatcacagtctctgtgctcggagactctttagttactccctgtccgtagtctcttccagtccctctgcctcttgccctgatccttctgcagtagattggctcaacgatcccctctcccaaaaaccatgtagatggcatgagtttttgctttccttactgtatctgtgtacttttgcctccaagtaggtaggtgacaattttctcttaataccatcctttcaaagggaatgattattccacttctgtttcatgatggccactagtgtatgcccccatttggtgattcataatacaacaggaatacctggaatgtggcaacgtgcgcttgaaggtccactctgagctctggaggcactttctgtctcctgtgaccctcaatagaactcagttcctatgagtccctataggagcagaggccctggctcacccttgcatgggtggtgggcacacttccccatcacacagaggtgcttttctcactaattctgtcttattttgcagagtccaacttaggtctagaaatcagcattcactgtccatgtcacacctttcagcccaatggagatatcctggaaaacattcacgaggtgatggaaatcaaattcaaaggtaacaaaatgaatgtgtatggtaggatgggtgagtgggggggaagttaatgggacaggatagtgcaggagacccttaccagacctcaagaaaagaaaccaagctccttcagagagatagccgactattttgtacttgagtaattctgctttgccccaaaagcaatgagtgtaactttcagtttatagcttagagaatgcattagcctctggaagacaacacgtactggtaagtggtgaaactgtgtaggcaagccatctagcctctggtcctagtgaaatgggatgagagttcctctttcacagtgttgtcaggcaattaaatgagataatgaataaggaacacagtgccagaaatgctcaacagataggacttgtcttcctcctccctaaaagaaattaagtttggctgtcctgaacatgagtgcccagacaactgagctttccagatgtgcagggcctacctgaccttgcccaggggtcctctgggtttggatgattgcttcgagcctcagggtgtttgtccccggggtgtttgggtagagatggcgaagtcgttgagagtcatttctggttttccattatgtttgcaaggaactcagccttgatgatctctggagttcagggaagttctcttttcctttcatattcccattttgggtaactgcggaacgcctgaggtcagaggcttgtctgggaaaaggtgcaggcctcttttggctcagcgctggacagtgatcttaccccacatgggctctattttacagccttttcttaaagccaaagatttgacactgtaaccacagaaccttagagcccagaggacctttggagtccttacctacaggccagcttaggatgaaaccttcccatttcagtgaatacttatcttgttcataaagattttcagaaaaagggatttgtgatccaggtctctcatttatcttacagatctggtgccccttcctgagacccgagccactcctgtagctatgtaaattaattcctcatgttcctgtcctcagtgaggatggacaacagttggcagctgtccttcgcaaaatcgatctccatttagttgagactctttctaagtcagtctccagtcttttccttttttttcagatgaaacgggttgatgaatttagattttctttccagagcttatttgctatttatcatatgcttcattatctcatctgaattttatagtgaaaacacttcaaagactctaagtgcaatgtgaatgttaacaattatacagtcttgtttctttggctcccattcaggctatcttaagttgtgacaccttaaatttttggtaggacttctgcgttatcttggtccattcacattttaagaggaaactcacaccccaagattctaagtctagaatctaaagtgacaatccagggctgggtgcagtggctcacacctgtaatcttagcactctgggaggccgaggtgggcggatcacttgaggtcaggagttcgagaccagcctggccaacatggtgaaaccctgtctctactaaaaatacaaaaatagctgggcatggtggcatgcacctgtaatcccagctacttgggaggctgaggcaggagaatctcttgaaccccggaggcagaggttgcagtgagccaagatggggccactgcactccagcctggccaacagagcgagactctgtctcaaaacaaacaaacaaacaaataaacaagccgacaacccggagatatgtgttaggtacccacttagtaacagggatgcttcataggtccatgaagattcctaggaatctcagcaagggctttctgccccttggaagatttctatacaagggtatggggatctgaacacggggcatctttcagtgggcatccttacaataataatgagttcttttgatactggcttctccatctgctcttcccctttctgcacctggacatcagaattaagctgcacttgtcccccacacctccctcgcagactgcactgcccctcctcctgggcagtgatggggcgtgtggaggaggcagcctccaagggctctgctctcttcagacaggagattgtcactttccttcccttcttcaggcgtggacaatgaggatgaccatggccgtggagatctggggcgcctcaagaagcagaaggatcaccacaaccctcatctaatcctcatgatgattcccccacaccggctcgacaacccgggccaggggggtcagaggaagaagcgggctttggacaccaattactgcttccggtgagactgggcccacatgggaaccaacatctactgcctgcctactgcccaatggctaggtcaggccccagagccaagccacactcaacagagggtccctgatgctattcacaaacatctccaggaagaagactgaaaatctctcacagagattttctctgtgaaatctctttctgttttcctgggagtcccactgtttttccataggctaactctggaaggagctggctgaagtaaatgaggaaaactctgtgaggaggagtgttgctaaaatagtttggattggagaggcttggtcaaagcctctccatgatttccatgttttaagcacttgtagagtgtatgtgtgagattaatgtaggagtttccattaaagaagtgctcagttagttccctatgaagggtccaaggatgctactggatggaggcaaatagaatggtctccatttgaacggaaagttggagctagagaaattaacaaatgaattcagaaattactgggtagccacaatagagagatagaaaagacccagcttctcttactcaggagcagtttcactgctcatttataaagggaggataaagtatgcatgccaactactaaaagggagaagatgatcacgcccatgagagggtccgaaggattaagtgctttaactgggagcaatgagttcacctatggacacaggaaaggcttcagaagggtgtggaatttgagcagaggcttcaaggatgaggtttggggatgaagggatccaggaggggaagcactgcaggtaaaggaaggagcatgagtgagtgagtccatctggcctcagaggatgccgaaatgaagctggggagaacgaattgggaaatatttagatctggaaaccatgtcttatgaggatggttgggcttgggaaactagggatgttcagttgggggaacagctcaacagcaaggtataggagaggcaaggtagttgccacaaaggctggcatgtagatttatttattccatcagttaggaacaaatcagttaggaacgaatcagttatcagttaggaacgaatcagttaggaacgaatgatcttggccagtgactttaatcatagtgatttcttgttcacaagaggcctgtagcagcagggttagggtgggctggctgcttaatgatgccaccgaagactcaggctttctctctttccagtctgccatgcttagtatgttggcttttcatccttttccttatggtcacaagtgattgctagggcttcaggcaccttgtccacatttaagacaagaaggaatgagggaaggggaagagccagaagctttcttcttccatctgtcacttttataaataatcgaatatctttgccagaacttgcccttaccccctgcatacttctccttgtctgatgggtcattactgggtcacatgaccaccgctactctcaagggaggacaggaaaaggagcatctggtgttttcgactctgtaatgggatgtcacaagggagaagggagttaggaatggttattgaatagataaccaatggtgtctgccatggttcacccttggaacccacaagaagccagattttggctaatagctgcctttggaagtagcaagttctaagtctcagcagatattaaagcagaggctagctgtccacttggcaagcggtattattgccaaatgatctctgtaggcaacagaattgaaggggcctgataatcacatttgggtgatctgttgaaccacggttctaatagaaggatatgccttatttggctaaatggcctttggattgagtctcagcagtcacctactatagtagtcaagctgcataaacttagaattgatttctgtctgggtgcacattaggagggtaaaaataaaaccaacctcaacaaagctgagttggctaataacattcagtgcttggttttatgtggagcgcttcatagcactgctttgtattgtgatagaaaagggtgcagggccacctttgcctctttactcttcctcatgcagcatttatctctgtttcttacatccttgggatcctggtctttaacacatgaatgtgcctttctggtttcttctgccccatgcccttgaacctgggattccattgatcagagccacctatgatggcatgaaaggactccaagggagaatatgagagcattcatgaagtttcttttattggtggttttaagttgattttctataaatgttttttgttgtagcaacttggaggagaactgctgtgtgcgccccctctacattgacttccgacaggatctgggctggaagtgggtccatgaacctaagggctactatgccaacttctgctcaggcccttgcccatacctccgcagtgcagacacaacccacagcacggtatggagcaggctcatgccatctgaggcactggggctgaccgaccagaccacttgttaaaaagaatgagtgaaggattgaatgttgagtgagcaaatgatggtctggggtgagtaaaattcctctggtgaaggttctgatcttggcaccctgactcagttctactcagtcacattctgcccttttaaattcctaccatagtttcaaccagctttttaatttgctttgtccaaagctctctgtaccgtagaaattaattaactgccacgtgttaccctatgtcagagatatgtgcatgtggctggcaaggaacactgaagtagaaaggcttctatcagaactctgatcattccagcctctcgaatgtagaaaacttactctgaaagacaacaacaaggatggacaagaagctaatttgaaatgctaggaacagaaagtgagatagccgagagtccacaacccctgaaactagtctgtctttcccttgaggggaatcaaaaatagggcagtaatttgtgaagcatgtttccttctagctcattgtttctgcatcctgtctggggccctgcacgctgcacttactaaatggctcaaggcaatgttttgtgagaacatttctcaccgaagtgatcagttccagctaggaagagcaatgtaagtgttttcttaaaagccaagataggccgggcacggtggctcacgcctgtaatcccagcactctgggaggccaaggcgggtggatcacaaggtcaggagttcgagaccagcctggccaacatggtgaaaccctgtctctaccaaaaatgtaaaaaattagccgggtgtggtggcacgcgcttgtaatcccagctacttgggaggctgaggcaggagaatcgcttgaacccaggaggcggaagttgcagtgagccaagattgcaccactgcacttcagcctgggtgaaagagtgagactctgactcaaaaaaaaaaaaaaaaaaaaaaaaaaaaagccaagataattcgttatcagtgtagtaactgtcatatgcttcaactcatcaccccaaacaagtgcagttgttctgcttctgtcattgtggatgaacagcaactacacaactactcactcacccaaaccaggttccaacagtttttttttttttcttttttttgagacagactcactctgtggctcaggctggagtgcggtggcactatttctgcttactgcaacctctgcttcctggattcaggtgatcctcccacctcagcctcccaagtagctgggattacaggcgcctgccaccacagccagctaatttttttgtatttttagtagagatggggtttcaccatgctggccaggctggtctcaaactcctgacctgaagtgatctgcctgcctctgcctcccaagtcctgggactacagctgtgagccactgcacccggcccccaacagttcctcttaaagagcacccgtggccattctagcacttgctcagcttctgggactgcccctggaactgggcgacttcctgggttccaggcctgagacttggccttccaacctctcactgacatgtcccttcccaggtgctgggactgtacaacactctgaaccctgaagcatctgcctcgccttgctgcgtgccccaggacctggagcccctgaccatcctgtactatgttgggaggacccccaaagtggagcagctctccaacatggtggtgaagtcttgtaaatgtagctgagaccccacgtgcgacagagagaggggagagagaaccaccactgcctgactgcccgctcctcgggaaacacacaagcaacaaacctcactgagaggcctggagcccacaaccttcggctccgggcaaatggctgagatggaggtttccttttggaacatttctttcttgctggctctgagaatcacggtggtaaagaaagtgtgggtttggttagaggaaggctgaactcttcagaacacacagactttctgtgacgcagacagaggggatggggatagaggaaagggatggtaagttgagatgttgtgtggcaatgggatttgggctaccctaaagggagaaggaagggcagagaatggctgggtcagggccagactggaagacacttcagatctgaggttggatttgctcattgctgtaccacatctgctctagggaatctggattatgttatacaaggcaagcattttttttttttttttaaagacaggttacgaagacaaagtcccagaattgtatctcatactgtctgggattaagggcaaatctattacttttgcaaactgtcctctacatcaattaacatcgtgggtcactacagggagaaaatccaggtcatgcagttcctggcccatcaactgtattgggccttttggatatgctgaacgcagaagaaagggtggaaatcaaccctctcctgtctgccctctgggtccctcctctcacctctccctcgatcatatttccccttggacacttggttagacgccttccaggtcaggatgcacatttctggattgtggttccatgcagccttggggcattatgggttcttcccccacttcccctccaagaccctgtgttcatttggtgttcctggaagcaggtgctacaacatgtgaggcattcggggaagctgcacatgtgccacacagtgacttggccccagacgcatagactgaggtataaagacaagtatgaatattactctcaaaatctttgtataaataaatatttttggggcatcctggatgatttcatcttctggaatattgtttctagaacagtaaaagccttattctaaggtgta

SEQ ID NO: 52 - DNA, 67345 bp, Homo sapiens
  source 1..67345: mol_type = genomic DNA
agcggcggccggaagctggctgagccggcctttggtaacgccacctgcacttctgggggcgtcgagcctggcggtagaatcttcccagtaggcggcgcgggagggaaaagaggattgaggggctaggccgggcggatcccgtcctcccccgatgtgagcagttttccgaaaccccgtcaggcgaaggctgcccagagaggtggagtcggtagcggggccgggaacatgaggcagtctctcctattcctgaccagcgtggttcctttcgtgctggcgccgcgacctccggatgacccgggcttcggcccccaccagagactcggtaaagacccaggggagttggcttaggccggcgcctggagcgctcgtttgagggaagagcaggggagctgggtctatcaggtgtttgggggcggggtattggcgatggtggcgcgtccctaagttttcagtgtagaagggggtgtggctctcggagtttggggaaagaataaaggagatgggcctgtctctgagtgggaaagggctactggacgggctccatgtagtgactgagcgcctgagaggggtttgctccctagctttgtgttcggggagggtgttgggaaagcggtaaggagtagggtggctggatcttgtttggagagggagatgtggtcagggttcttgccttagtagggaacaaatctagtgttgtgtgttcctaccagagccagaaaggaagggcccaaagctccagaattcttcctggtcctcgaaggagggaactagaatttctgctgtaggaggtacttatgcagtaatctcgttgggaggcggagactggagttggagtcttaagagttgtgtttttgcgaacatcctaagcacgttcttggttatttcaattgtagcttattggaggtgcttgggagatggggggaggcggaaacctggtaagccaactcgtgatgctgccactatgaatgctttccttgcacttttaaacaaagaaattatcaagagtgacgagtttgatgaatttagaggctagaaagtagagggttcctatttcattagattttccagagagattggattttaaggatggagatgcattaagggatctgaactttggtggaagtaagtttgcgtgaacttttagtgtattttaaaatccttttatctttcaaaaattgacgtgtaagatactttaattagtaataaagtgtgaaataatgttttcccagtgtgtgaaattgtaggcttgcatggttgtactggttcccaaatttcaccatgataccatgtgtagtattttttttctttatatttagtggacagaaattgtaatggattggtatggatactaaaggtgttgagagtgttatcacttgaacagctgtcttatgattctttccgattgaaatggattacaagtgactaatgaaaggcaagggatcttgttaggaagtgctgagaagtggtaagtcagtacaaattgaaggacattttgaggtaggattgtggttaggatggagggatagggtaagggtcttcattttaaggataaatgttagtaaaaagaataaatatgtattttgagatattaaaattatatttgcaccaccctgacacaactgtttcacttatgttattaatctgttgttcgtaggtaaaaataagcatgagtcccaaggaagcatacagtttaaagagaaacattactttctagatcaattcataacatttgcagatcgtaaggttttttagaccattttttttttccaagacagagtcttgctctgttgcccaggctggagtgcagtggcgcgatctcagctcactgcaacctccgcctcccggggttcaagcagttcacctgccttagcctcctgagtagctgggattacaggcatgtgccaccacgcccagctaatttttgtattcctagtagagacggggtttcaccatgttggccaggctggtctagaactcttgacctcgtgatccgcccacctgggcctccctaagtgctgggattacaggcatgaaccaccgctcctggcccatgtgtttgttttttatttgcaaaatgcagaccacctgtgccagaagaatgcatagacttttcttttttcttttcttttctttttctttctttttttttttttttgaggcagtgttttgctcttgttgcccaggctggagtgcaatggcgtcatctcagctcaccacaacctccgcctcccgggttcaagcaattctcctgcctcagcctcccaagtagctgggattacaggcatgtgccaccacgtccggctaattttttgtatttttagtagagatggggtttctccatgttattcaggctggtctcgaactcctgacctcaggtgatcagcacacctcggcctcccaaagtgctgggattaaaggcttgagccaccaggcccggcctctttttttttttttaaacgaaatatttgaaggacacacaagtattatacgtggcattggaaatacaaagatcagacgatatccatcttcaaatggttatagcatagggaaatagacattcatttaggacacttctaaaacagcatagaggagagtgctagagtacgttatagcaagtgttatcaccaaatgaatcttagagatcaagtctagttttcaaataaaggaggaggaaaatgagtctcaggaagatgctgtcagttgtcaatgatgaacataggccttgtgggtatttttcttttgaagaatgactttttttttcagtttgtttgacagcttacaatataatttgttacttaaccttaccattagattgagttggtcaagactagcaaatagtttcatagttgaaaaacatgctttattatttattttttatgtttattgtcctacaaatactactatattgcagtactcaatatcgattaggcatatgacaacatttttctgaaaggcaaaaaatacctaataaaatgaagcctggtttttagagtcctctatgggtcaccaaaaatgatttcaattgaactgttatgaattgcataatttaggaaagttatgagtcatatgagcttagtcatgatgatatcttgttgaagttgcagctggggtgtataagtctcactttgatttcaaaatcgttttccctttgtgttacttttaataaaagaggatgtagtgggtgggaggaaaaaatataggtcacagatgagggatgagaaagtttgtatctgaaacatgtattttcaaatttaccttgaggttattggcatggggattctccatattgcagtgctgatttcattattgacagcaccattttactcagtattttgacatctggctttctcttttgatgttaattttgcttactggctgcattcctttgaaacctaaatgcttaactgccctaactgctccaagggagatttaatgtaactctgctttatattagtctaagagataaaccatatttcaagagtagaatggagaggaattaagcagataattgtgatggggaaactggagagatccttttgactttcacaggatttcctagaacattaaatataggtttcctccaaggccaattgtggttgatttttggatccttcaccattttctatttgtgagataataagtgtatacagctggaagtgtaatgtgaagaaagtctgaaaaagattgataggaaaggaggacaggaatgggcttcattgaggtaacggaagtgaaatgaaaggcttttcatatatgggttgagcatccctaatctgaaatgctccaaaatttgaaactttttgaatgctggcatgacagcacacattacccctaacacacgattttttcactgttagtggtatattttttactgtgtagtacttatgtgtgaataggtataacaaaacgattacttattgtagcatgtaaaatcagtcaggaatgatggtgatgccagacaaccacagattatttatgtgggtggccgagacagtgacacctttgctttcgaatgcttcgttgtacacaaactttttttcatgcaaaaaaagttacttaaaaatattgtttaggccaggcgcggtggctcatgcctgtaatcccagcactttgggaggccgagctgggtggatcacgaggtcaggagatcgagaccatcctggctaacatggtgaaaccctgtctgtactaaaaatacaaaaaattagccaggtgtggtagcaggcgcctgtagtcccagctactcgggaggctgaggcaggagaatggtgtgaacctgggaggtggagcttgcagtgagccgagatcgcgccactgcactccagcctgggcgacagagcaagactccatctcaaagtaagtgaataaatgaaacataaatgaattttatatttagacttgggtcccatccccaagatacctcattatgtatatgcaaatatttcaaaatttaaaaaattctgatgaatgaaacacttctggtctcaagcattttggataagggatgctcaatctgtatctctttatttactcctaaaatcagccaaggaaatgggcatctctccgttcccccccttccttttttttttttctttgttgttacatgagttgtactggtttcacttcatttgacagtgttctgctaatgactagacgtgtatctctgacctggacttgttctctggagttcatattcagctgcccatttggcacttcaaatataacatgtccaaaattagttaccttttttttttttttgagacagagtctcactgtcacccaggctggagcgcagtggcgcaatcttggcttactgcaacctccacttcccaggttcaagtgattctcgtgcctcagcctcacgaatagctgggattacaggtgtcccccaccacgcctggctaattttttttttttttttttttttgtatttttagtagagatggggtttcatcatattggacaggcctgtgttgaactcctgacctctggtgatccacctgcctcagcctcccaaagtgctgggattacagacgtgaaccactgccccagccagttacctattcttttgattacaagaatgagtagctggacacagtggcttacacctatagtcccagcactttgggaggctgaggccggcggatgacttgaggccaggagttcaagaccagcttgaccaacatggtgaaacctgtctctactaaaaatacaaaaattagccaggcgtggtggtgcgtgcctgtaatcccagctactggggagactgaggcaggagaattgcttgaacccgggaggcagaggttgcagtgtgccaaggttgagccactgcagtgcagcctgggcagcagagtgagactccatctcaaaaaaaaaaaaaaaaaaaaaaaagaatgagtatcggatacaggtttagcctaggactaggcagggctgctggtaattgtggaagtagtctcattgcctaacctgaaacttgcatcctggttactggtcttgctggagagtcttggctcaggttacgtcccaggtctgttgaggagctcttgatagggaattagttgaagcagctcatactctatcctcctttactggtataaatccataaaattgtttagttcccaggctctggggtccctggcctagcagagagcactgctccctttttctcattccttagtcccaacaacccgcacctgacacttactacacgtggcctgcttccctgtcctgtgtgttttggggggtgctgaagaggaaggctcctgtgtcttcagcacaaacacaataaacacttcacagcagtactggctttatgttttccatttctgatatcagaagtaggagcatgacattgatagtgtcattttgggggaacttttcgtacttcatgcagcagagcagtgaagagtgagctgagtgccttggggttctgcagtacactctcaagtagtattttaggaaaatgcaatttgctgaaaaaataaaagaaattaatgtaaaaaatccacaagctgggcgcggtggctcacgactgtcatctcagcattttggaaagctaagggggaaggatcacttgagcccaggagtttgagaccaggctgggcaacatggcaagaccttgtctctacaaaaaaatagaaacaaaaattagccaggtgcggtggcatgtgcctgtggtcccagccacccggaggattgctcatgcccaggaggttgaggctgcagtgagtggtgattgtgccctgcactctagcctgagcaacagagcgagaccctgtctcaaaaacaaaacaaaacaaaaacccacacgtttccagaaccttctcatataacactttatttacattgttcttaaatacgtgtgggacggttatatacataccactatacttatgtgtatatatgttgatatacacacaaaattatatacataatttttgtttgtttgtttttgagatggagtctcactctatcacctaggctggagtgcagtggcgtgatctcagctcactcactgcaacctctgccacccgggttcaagcgattctcctgcctcaggcttctgagtagctgggattacaggtgcctgccaccgcgcctggctaatttttgtatttttagtagagactgggttttaccatgttggccaggctggtcttgaactcccacccttgtgatccacccacctcggcctcccaaagtgctgggattacaggtgtgagccactgtgacctgccatatacataattttttaaagtttcacgattagttttagcttaaaaatgtcagctctgggcttaatgaagaaaatatggatatactttatgtcaatgcattaaagtgaatggccataaaagcttatcccagagacaaaacaattcagatataagagaagtgggagagtggaaggtttatctaatcttctgtaggcaactccacagctacaaccagaaggccattttgttacaggcctgaaagccccgttttctttttattcttctttgaaacctttagaaggaacaaagtattggctactttttaccgctgatgtcagtgttaagaatcttgtgataacatagatttactctccctgctgaaaatcactatgtggctcatcagtaacacaactagacatgatgacttaatgcaaaggaagtcctatgtaaatgagcaatgaaattgcaactgtgtataaggaacaaaatagaatatgaaactccagaatcttttgttttcatttctgtttctcccaaggctctatcattcaaaactccagaatctttcagcatgcaattgtctcctgatatcagcccctctcttgttttgttttcttttttttttttttaatcacagtgagccacaacctaggagtcttttagtggtttctacttggtttgctctgcagcctaccagcagatttcctacattccggtcttgttcccctctagcccattctccacactgcagtcataatgaaatttctttcttttttgggggggatggagtctcactctgtcacccaggttggagtgcagtggcatgatctcggctcactgccacctttgcctcctgggttcaagcgattctcatgcctcagcctcccaagtagctgagattatacgcacctgctaccacgcccagctaatcttgtatttttagcagagacagggttttgccacgttggccaggctggtctctaactcctgacctcaagtgatcgcccaccttggctttctctctctttttttttttttggattttgagacaggatctggcctcgttgcctaggctggagtgcagtggcacgatatcagctcactgcaacctctgcctcctgagctcaagccatcctcccacctcagcctcctgagcagctgggactgcaggtgtacaccaccacgcctggctaatttttgtattttattttatttatttttttggtagagacggggttttgctgtgttgcccaagcttgtcttgaactcctggggctcaagcgatctacccatcttggcctcccaaggtgctgggatgacaggcatgagccaccacagctggcctataatgaaatttccaacttacagctattgccattatccaaagcccagaatccctgatttccttccatagcccttcatggcctgaccagtgcctgactctccagcctcacacttcatattctctctgtactgctctgcactgtagcctcattgagttgctttcacgtctttaagtgttgtgttctattttttgtggaattcagcatatgttatgcccttgacctaaggcctctcctttcttttccttctctggggtgctgcctcatccttctggtcttcaaaaccgtttccctgggaaaacatctttgactcagcaggcagggatcatgcccctgctgtgtctgtgcataactttctgtggctacttctgtcttggtctgtgatgtactttataataattttggtctttcctccagtgtcacaatactggaagtctgtttctttttctctgtgttgtatccttagtgcctgaaaggtaggaggttctcaataaatatttgttaaataatcaagtaaatggagtctggtggaaaagagaaaaaataagtgtagaatgtgtgtgcaagaaaggaggggtagggggatgaaaaagataacaaaagcacataacaaaacaacaaaaagcaaaaacaacaaaaaatgcagatgacaaaaaagataacaaaatgatgactgctgtggcaacttgtagaaagtaaggaaggtgctctcattctagagagaagtaggcagccattgtagttttttaaagagagaatatgggctgggctctgtggcccacgcctgtaatcccagcactttgggaggccgaagtgggtggatcacgaggtcaagagatcaagaccatcctggccaacacagtgaaaccccttctctactaaaaatacaaaaattagctggataggtggtgtgcacctgtagtcccagctacttgggaggctgagacaggagaatcgcttgaacccaggaggcggaggttgcagtgagctgagatcacgccactgcattccagcctggcgacagagtgagactccatttcaaaaaaaaaaaaagaatatggccagacactgagctgagatagacagtgcggcagtgtctggtattaactgtaataaactctactgtcagaagcaggtggtttatacttaagtttattgagagaattggatatggataagagataaactcttgggaaatggggagaaatataaattctgttgtaaagcctgtaaaaaattgagattactagtggttagaattttggaagtgaagtgcagtgaaatattgagtacctgagaggttacttgttagtgaaaacacaatagcagtagtacgtagctacagtttggctccaaaggaagaactgtttttactatagtttgtaatggcttcagaatcttcaatttgagatatccagttattaaaagagaatcaattgcagttgaaatgcattagttaagtattttaaagtgctttagcaagctacatttaaaaagtgcttattatagaaaatatacccaaaataaccaatgatgttactgtcttgtgcttattttttctagacctatttttatacatagttaagattatacaatatgaatatttctgaaatctatatttaacattataacatatgtatttttccatgttctttctttttttttttttttgagactgggtctcatcctgtcacccaggctggagtgcagtggtgctatcttggcttactgcagccttgacctcctgggctcaagtgatcctcccgcctgaaccttctgagtagctgagactacaagcacatgccaccatgcctggctaattttatttttactttttggagagatgagggtctcactattttgcccaggctggtctcgaactccttgggtcaagcaattctctcaccttgacctcccaaagtgctgggattacaggagcgagccaccgccctcagccccatgttcttaaaaaccttttgtgaacgacatttaaaatagttgcagattttttcccctgtctttggaagtgttacaacatccaaccatttcacagttactaatttaccatcattctggtttttgtccttgaaaataaggcaaggctgaataatgaacatctttgtggctaaagtttttttctttactttgagttgttaccttcctttagcttagttcagtggttttttctttttcttttttgagatggagtcttgccttgttgcccaggctggagagtagtggtgtgatctcggctcactgcaacctccgcctcccaggttcaagcagttctcttgcctcagcctaccgagtagctgggattataggcgtctgctgccatgcccagctaattttttgtatttttagtagagacagggttttgccatgttggccaggctggtcttgaactcctgacctcaggtgatccacccgcctctgcctctccaagtgctgggattacaagtgtgagccaccatgcccagccagttcagtgattttcatatttgagtgtgtcagccttgcctggaagccttgttaaacacagactattggatcccactgggcggatttctgtttgagcaggtctgaggggagacctgagcatttgcatttttaacaaattcccagttgatgatgatgctgctggtttgggaactacactttgagaactactgggctatattattgacaatgaaactataatgttgaggttaagttcctaagtcagtaggagtgattatgatcttgaatgaaactgagttcatgtaccaacctgtatcagggaaattgaagaactaaaggaccatattgcatttcagcactgagaattcgtgcagtttgtgaacatgtgagtgctgatatgtgcaaggtttttgctgagtattgtgaggcaaggatgttgtaatgaataaaaaatagccctttttggctttttttttcttcttttgagatggagtcttgctctgtcgccaggctggagtgcagtgatgtgatctcagctcactgcaacttccgcctcccaggttcaagcgattcttctgcctcagcctcatgagtagctgggactacaggtgcccgccaccacgcctggctaattttttgtattttggtagagactgggtttcaccatgtttgccaggatggtctccatctcctgaccttgtgatccccctgccttggcctcccaaagtgctgggattacaggcgtgagccaccgtgcccagcccggccttttttcccccgcctagagatggagtcttgctctgtcgcccaggctagagtgtagtggtgcaatctcagctccctgcaacatctgcctcctgggttcaagcgattctcctgcctcaaactagctgggattacaggcatgcaccaccatgcccggctaattttgtatttttagtagagacagggtttcaccatgttaatcaggctggtctggaactcctggcttcaggtgatccttggcctcccaaagtgctgggattacaggtgtgagccaccatgcatggcctcatttgggaaacttttgatatcagaatcttaggtttttcattagagattgtcagatttccatattcctctggaaggtaaaggcctaattgctagcattctggaagccagttagggtaggagggtaggagggtagggtattgggtagaggataaagaaggggtttgggaaaggtggggggtgtctcttggcagttgtatggttaaattgagtttttgttttatttagtgatatgtgttttttgggtacatgtgatattttgatacctgtgtataatatgtagtgatcaaatcagggtgattgggatacccatcatttgaaacatcttttctgtgttaggaatattacaagtcttctagctgttttgaagtatacaataaattgttaactataatttctgtactgtactatcaaatattagaacttactaatcaaactgtatttttgtaacactaaccactttctgttcatctccaccactcccacttcccttctcagcctctggtaaccaccattctgctgtctacctccacgagatccacttttttagcttccacacatgagtaagagtctttcttttaaaactggttttgtgagcatatttaacatcagtagcaataaacttgtattttaagctcctgttgctgtattttgaggaccttctaagtccattggaaggattttgaataccatagtgtctgcagtgatagttgttgaaagaaagggaaggcatcagtgcaaatatttttagacagtttttaaagagactcaagtcacccaatttgtcttctaaaaatcctgattttggaagaggcagtggagtttctgttgataaaaaatgatttatagtttgtgcttggcacttcctaatggattacatcaggaaagatttattgtctggcactctcattttaacgatactacaattgattattaggtttagatgctaataccttttttacctttatttcagagaagcttgattctttgctctcagactacgatattctctctttatctaatatccagcagcattcggtaagaaaaagagatctacagacttcaacacatgtagaaacactactaactttttcagctttgaaaaggtaatttgaattattcatggaataatgttggggcactgggggcttggtttggcaaaaacaaaaaagtaagggtatctactgaaatcttgggaaattacattttaaagatttgtaattaatttccagtataatgcttattctaaaattcatactggggctgggtgcagtggctcacgcctataatccgagcactttggggggccaagacatgtggattgcttgagctcaggagtttgcccaagctcagcctgggcaacatggcaaaaccccgtctctactaaaagtacaaaaattaggcatggtgacacgtgcctgtaatcccagctacttgggaggctgaggcaggagaatcacttgaaccagggaggtggaggctgcactagccgagatggtgccactgcactccagactgggcaacagagtgagactctgtctcaaaaaataaataaataaaataaataaagttcatactgatgagtatttttaaaaaagtaaatagatattgcagaggtgttaatgatggtaacgatgtttagaaaattctaacataatttaaattaattgaatgcttataaaaccttttgtttttggtgctactttataaccatcaatcatgtgctaaatattatctttatatatgaagagataaagattttgttcaggaccccacagcctggtggtgagctgggtctagattttactgttctatttatttatttagctaactagttacttagtttccaggattctttaacctgcttcatatttatttatttttaaaaacagggtcttgccatgttgccaaggctgatcttgaacttctgggctcaggtggtctttccatcttggcctcccaaagtgctgggattacaggtgtgagccaccatgcctggcccaaatttaatattctttctacattgagttcctcttacttcttagcataaattgatggatatgttctatttcagtagtaattttaataccacgtattgttttgcacattgaaatgttaaataattgcaggcctctttttaaagtctttaggaagctttattcagtatcaaaaaacagacacatggagaattgactgaattattctttatttatttatttttttgagagtcttgctctgtcgtccaggctggagtgcagttgtgtgatcttggctcactgcaacctctgcctcctgggttcaagcgattcttgtgcctcagcctctcaagtagctgggactacaggtgcacagcaccacgcctgggtgatttttgttatttttagtagagacagagtttcaccatgttggccaggctggtcttgaactcctcacctcaagtgatccacgatctcggcctcccaaagtgctgggattacagacaggggccactgcatctggccatctttattctttatataggacaagccttctcaactatgttaaaaaataaaaggaatatgtgcgtctggtttaaaaaacaagccatggaggatatgcaaagtttttacttctaactcagttagacttctcagacccagagaggtttcctttgtaaacttccaattttttgttttgttttgttttttgttttttgagacagagtttttgctcttgtcgcccagactggagtgcaatggcacgatcttagctcactgaagcctccacctctcgggttcaagcagttctcctgcctcagcttcccgagtagctgggattacaggagcccactgccatgctcagctaatttttgtatttttagtagagatgaggtttcaccatgttggccaggatggtcttgaactcctgacctcaggtgatccacctgcctcaggctcccaatgtgatgggattacaggtgtgagccaccgtgcccgacccaaaatattttaatgcatgttttttgcctataggtctctgtgtgtgtataggtgatatagatagcatatttacctcattttaaacagctgcataaatattcctattgcatagaattgtaacaacatactgactaatacactacagatggatattgtttaaccaaagtgatttttttaatacaacaaacagtgctctagtgagtatctttgtaaatgtgtaccttgatgaggtgtttttataggatatattcctggaaggagaattactgggtcaaggatatgtatactatgtttattgatattgctctttcctcccaaagagatttgacaaatttattcttccagcagcaatatatgagtttacctgtttcctgttatctttgccaatagtaggtttatcagcctttaactgtcacccctctaaagggcatggcattttatagttgttttgattttcattttgtgtgacattgagcatctttttatatatttgtaagtaatttgttttatatttctgtaaactgcctttttatctcttttgactatttttctattgaatttgtctttctaactactgaattgtagcagtgcttagtatattaaggagattggttcattgtcatgtggttattttaggcaaatttttaatgcaaattaatttttcctagctattgcaattatccttaggttattttttaatgacttctttttattcgattttatgtcagaatattatagtattggttattagctttcaacttacaccaaatttgagcagattggtaatattaatagctacagttaatcaggtacttattttctgtaatttactggcattttacataagttatctctaaaagtgattccttttttgaaggaacaaaaaaaaaaaaattaaggcttagacagcttagtaacttgcccaagattactcagctagtaaatgacagatacaagatttgaacaaaggttggactccaaaacttgtgttatttctgctatactggtggagagtttggtgaagaagtggatatagtagcaagaaataagtaggagcgaaggaagagtgaggaaactataaaatgaaaagaactcaaagtttagctttttgggtttctttggatttgaagtggcctgtagaatccgtattctagaggcaaaaacttccatagccttacatatttctctttcaagtttcgtagatgacattgattccctaagaaaatattaaatcgtagccacttgttatcttttctctgtgtaagaaagcagggaagtatgtaatttattttacaaagtttccatactaaatatttaatgggaaatttatctaacagtctatggaattttataccaggtgttttaaaataggttatttcctttaatccccaaaaccgttcagttattaggtgatattatttccatttgtagataaatacttaggattcaaagattgaggccaaggtcggacagtgagtaaatgaaagtaggacttaagccaagtttgtcagactccaaagcccataccctttcttttctatcatattgcgtcattaaagtttaaaacaagaacaaaaacaaagatagctgaagtaatcagtttgtatcagggctgaattaactctatgaaacccctcattacttgatggtaaatgagaagattccgtttttcgatagcagtggaaggcaaagtaatttaaaccaagatcattgcattaaatttggatgtaactattagaggttgaaaaagcatagaaacactgagaggttgtatgaagagttgaagtaacttaagaaaaaaagaaacttgtttaaaatttgccttacaagtttcatttcctttttgttataaatcaagaaattatcagctaggcgtggtgactcacacatgtaatcccagcactttgggaggccgagctggatggatcatgaggtcatgaggtcaggagatcgagaccatcctggctaacacggtgaaaccccgtctctactaaaaatacaaaaaattagccaggcgtggtagcaggcgcctgtagtcccagctatttgggaggctgaggcaggggaatggcgtgaacccaggaggtggagcttgcagttagccgagattgcgccactgcactccagcctgggcgacagagtgagactccgtctcaaaaaaaaaaaaaaatcaagaaattatcttatttttaaataacgaaaaagctgcggagtatatactgttttgatacttttttgatgttgcctgaatttttttggaaaaagttaaatgtttctcctaaaagtgaaatatatcagattacttgagaaggtctagaactgataaagaaatgaaagtgatatacctgactaaatggaccattaaaaatggttagggtaataatgttaattcaaactggttagctggtctttagttactgtaaattcttaagtcaaaagtcagaaagataaaacgttaaagaaatctgtaagaaaatgacttcacataattttgggaggataaagtaaaagaaattttgacattctgttggacgttttataactcaaaagctaatattggaaaatcaaaaaacatgaattttataatcgcttggtctttatctttagaaaagattcttaatgtagcaaatgaaaaatgcaattccactgatttctttctgaaaagaacattaagtaatgttgcaactcttagctttaaaacaaaataataagacatttataataagtatgcttttgaaagttctcagcataactggagggaaaaatcataactgagaatgtgtgggaagatatgttttaggatagcagaagaaaatgttccaaggatttacgaaataatgttctattgtcttttccctttgaccattaaaaaaccacaagcaaactaaaattaccttgttatgctcaaaaagttaaaaatatttgttgccatggagatagtcccagtctagatttctttccggtagtttaaagacttttgcaatcccatggggaagtaatatattttcagtacaacagctgacaaaatttgtttctgtgggtgagatgaataatatacctttctttgtctttggtgttcatggacacattgaaagactataaataatacttgagaaagtcttgctcaccactcctagttttcatgtaaggatggaaagtcatagaaaacaaaaagaatagtaagccaattaaagaactggactgaaactcaacaaaaagaatagtaagcccactaaagaactgaagtgtataccccctcccctctcctcccctcccttcccctcccctcccttcccctcccttccccttcccttcccctctcttccccctccccttcccctctcctccccctctcctcccctctcctccccctctcctcccctcccctcccctcccctcccctcttttcctgtcttctggtgccaatggagtctatattctaatgtctgtcttagataccttgtatttattttcctaactgtaattgtgggttacttttttgcaagatatgttgttttgaggaggaaaaaaagcacgagtactttttttttttcttattttgagcgggagtctcgcgctgtcaaccaggctggcgatctcggctcacagcaggctccgcctcccgggttcactccattctcctgcctcagcctcccaagtagctgggactataggcacccgccaccatgcctggctaatttttgtatttttagtagagatggggtttcgctgtgttagccaggatggtctcgatctcctgacctcgtgatccgcccagctcaacctcccaaagtgctgggattacaggcgtgagccactacgcacggccgcatgagtacttttaaatatagaaagcagcatttattaattttgcacagcaataagaattttctcatagtccacccagcttgatagagacagcatagtacagggttttgaaataaaccaggtttatttcccagtttcaccatttactagctgtgtaactttgagtaggttgattagcttccaagcctcaatttgtacttgtgtgaagtggggataatagatgcatagtacctaacaccaagtaggtgttcaataaatggtatataataggattagtttttgataataatttttttagataatcaggattccaacttaactacgcagtcatgtgtgtttccttattcttcagtgttttccaggagagatgaatgtataagttctttgaatatctttaccctagtgtgagtttattgtgatctgctgtttttatagctaaataaattagttcatttgtcgttacaggagatatattgctctaagtacctaataagactttagttgtaacttgcatagtgttttattaatgtcaatgcttctggctttttaagaaagtttaattatgtgaaaatgagacttaaaatttgtgtgcttagagtaaaatatgaatgcatttttcttcaggcattttaaattatacctgacatcaagtactgaacgtttttcacaaaatttcaaggtcgtggtggtggatggtaaaaacgaaagcgagtacactgtaaaatggcaggacttcttcactggacacgtggttggttagtatggagcttgttggtttgcccctgtgtctggtgtattaggtctccaaatctaacttgattgcatattcttttctggtgcaggatagtggggacggggtgtcatagaagtgctattctttgacttttctttgaggtatataagtttagaggcaggaacattctaatagaaggaaatgagtattatctaaatgtcatactagctggctggtttaatgattaaaattaaattcttcttaagtgataggaatttaacctttcttttcctcagtgactgtaagctttctttatgatattttaaacagggaagcttggagataaaatacttggtgatcctattacgtatgtatttgagaaaatttatcaaacaagcaattgcagtttactttttgacctttttctgcaatgagaaaaaaaaatgtcattgaaatccacaaatagtatagttcctaggcctgtacattctaaatcatgctttctgtctctcttagttcttcctttacctagaagtagataaaattattccagaagaaaatcttagcagttttgtttgttttgggaaagggataggtttcaagtgactaaacttgaggctaccccttaggagttgagattatctagcttctttctggagcctttgtttcttgttttgcagagctctcacagtactaggcaaattccaccctgaaggatttaatttttattgagagtaatgcatagtttcttatttgatgtaagtatttttaaataataattttttttttctcttaaggtgagcctgactctagggttctagcccacataagagatgatgatgttataatcagaatcaacacagatggggccgaatataacatagaggtaaatttatatgtgaattttttttcagtagcttatatctctgattttcaaaaagctgctcagttctgcaaaggtgaaaagtaattatacttatttctttcctcttcgtatttgaagttttttactaggaaagtagactttttaaaaaaggataatctctaagaagctgtgttatgatacaccctgtatttctaagtaccataattgagagagttacatgtgggatggataataggaagagaaaactttctttccctcctgactcattttttaattctttctcaaataataaatgtaaacatcctcagaaatgaaaagtgaagtattatttttcaatttctctgtttttctgctagacacactggaaatgctagatcaatgaaaggtggtagttcatagtctgagaagttaaagaggaagctaggaaagtcaggctgtggtcactcttccattgaaagagtagcaatagaaatcaagaccacagtggctgcattggttaagacacatatctatctgtcagatattagtctacaaaacaaaacgtttcctcataattgtgaattgaagttgattctgtgtttcctgaaaaatgagaagactctgggtggtggtggtgatatcactaaaatagatcacctgtgggaaaactgagtaagattggtcaaaatgaaatgttcaggtgtatttgagtgcttaataggggtaaaacagtctgctggagctatatatactatatgttttaattatatccaatctacatgactgttagtcctttgactgtccattattgtgaaaaagaaacctatggccttgcagtatgttatagtttgttaatgtttaagctatttaatgtcaatgttttgaggagtctggcctaccagaaagagtcagaaatttagtagaaagtaaaggaactaatattataaatgcattcattctagaataggcaaagcatcactggaatgtcttaaatttgcctgttctttcaaatcaatttattttttaagaatacctttattttaaaatatatgctcattgcaaaattcggaaaatagattatctgtacttggacagataactactattgacattttgacagacatccttccaaatttttttttctatgtgtaaatacacaaataaatatagttatacccactattttttcctgcaaaactaggaccatacaatatgtacagtttgtcttcacacatttttcgtttaacaatatgattatgaaccttttcgtgttaatatagatctaaattagggttttgtttgtttgtttgtttgttttttgagacggagtcttgctctgtcacccaggctagagtgcaatggcgtgatcttggctcactataacctctgcctccccggttcaggcgattctcctgccttagcctcccaagtagctgggactgcaggtgtgcgccatgatgtccggctaattttttttcttttttttgagatggagtatcactctgtcactcaggctagagtgcactggcgtggtctcggctcactgcaacctctggctcctgggttcaggcggttctcccgccttagacccttgagtagctcagactacaggcacatgctacctcacctggctaatttttgtatttttagtagagacggggtttcaccatgttggccaggatggtctcgatctcctgacctcatgatctgccagcctcggcctctgaaaagtgctgggattataggcgtgagccactgtgcctggcctcaactgttttgtttctaacttttgaaataaaaggtattgtagtgaacagccttgggcacaccttttggtgcatgtgtttagttggaatagtctggatgataggtaatagtctgggaagttaaatgaagaaactgtaggaagctctgtctaggctgtgcgagggcttcagataaactcccatagctgagtagcttaacacaagcaaagttttttcttactctcctgtggcttgatgtgggttaggtggttctcctctactttgtggctttgacttttggacacatgtcctctgtagttctcacagaaagaaaacagagctagagaattatacaggatattaagggccaggcttggaaatggccttccgttcaatacattctagaacactttatctctgacctgctacaaaggagaatggaaaagatagtcgtaatttgagctcagaaagagaaaatagtgtggtaaatgcacagcattgtttttgctgcagtgcatatgtctgcttatttccttagaataatttattcttttttgtttttttgagactgagtctcactctgttaccaggctggagtgcagtggcgtgatctcagctcactgcagactctgcctcctgggttcaagccattctcctgcctcagcctcccgagtagctgggattacaggtgcgcaccaccacacccagctaatttttgtatttttggtagagacagggtttcacaatgttggccaggatggtctcgatctcctgacctcatgatctgccagcctcggcctctgaaagtgctgagattaaaggcgtgagccactgtgcctggccagcttattaattcttaagccaaaatatgtgtctttaggatccaagttaaatttgctcagattacatttttttttttttaagatggcatctcgccctgtcacccagactggagtgcaatggcgcgatctcggctcaccacatcctctgcctcccaggttaaagcgattctcctgcctcagtcccttgagtagctggaattacaggcgtgtgccaccatgccccgttaatttttgtagttttagtagagatggggtttcactgtgttggccaggctggtcttgaactcctgacctcgtgatctgcccatcttggcctcccaaagtgctgagattataggcatgagccaccacgcccagctagattactcatttttttcaaatacttccttttggaaaaataggaattctgtttccatccatacctttgtttcactaagtacaaaaatgagtataactaatatttcattgtaagatatttacttagccaggcacagtggctcacacttgtaatcagcactttgggaggctgaggcgggtggactgcttgagcccaggaatttgagaccagcccaggcaatatagggagaccttgtctctactcctccacaaaaaaaaaaaaaaaaaaaaaattagctgggcatggtggcacatgcctgtggtctcagctacttagaatgctgaagcagtaggatcagttgaattcggaaggcggagactgcagtgagctgagattgtactgctgcactccagcctgggtgacagagcgagaccctatctcacacatacacacacacaaagatgtttacttacaagtatactcatcagataccttgagggacttttgcatgaaattaataatgtttattgaaaaaatgatttactacttacaggggtgattttcatactctttataattcttttgatacttttatagttcataagtgtggtgattggctgttcacacacacatatgagatgtaccaccctagaaccttgttacaatgttagcacattaccagtctgacatgaaaaaaaataattctttacacttaccttgatgcaaaaacattgtctatctgcactaatatcttaggaatataagtgagcaggaaaaaatatatatcttatttttaacacatcatcattaaatattttgtttatgacagtcttacttggtcactcaggctgaagtgcagtggtgccatcatagctcactgcagccttgacctcctgggctcaaacaatccctcttttctgcctcctgagtagctgggactacaggtgcatgccaccatgcccaactaatttgttaaatttttgtagagtgtatcagatttttgatgaggtctcactgtgttgcccaggctgatctcaaatgtctgactgtaagcaatcctcttgcttggcctcccaaagtgctgggattacaggtgtgagccactgtgcgcagccgttaaatattttaaaccgtcactgactttaccatagcttactatttatataaataatcctgggttaaacttgcatagtgagataatatttcccccaacttttatttatttatttgagatggagtcttgctctgtcgcccaggctggagtgcagtggcgcaatctcggctcactgcagtctccgcctcccaggttcaagcatttctcctgcctcagcctcccaagtagctgggattacaggcacacgccactgtgcccggctagtttttatatttttggtagagacagggttttgccacgttggccaggctggtcttgaactcctggtctcaggtgatccacccgcgtcggcctcccaaggtgctgggattacaggcatgagccactgcatccggcctaatttttgtatttttagtagagacggggtttcaccatgttagtgaggctggtcttgaacttctgaccttgtgatctgcccacctcggcctcccaaagtgctgggatgacagacgtgagccaccatgcttggcctcccccagcttctagttttaaaaatgttcagctggtgcagtggctcatgcctgtcatcccagcactttgggaagctgaggtgggtggatcacttcaggccaggagttcgaggccagcctggccaacatggtgaaacctcgtctctactaaaaatacaaaaattagccaggcttggtggcttgcgcccgtaatcccaactgctcgggaggcctaggtgggagaatcgcttgaacctgggagacagaggttgcagtgagctgagatcgctccactgtactccaatgtgggtgacagggtgaaactctgtctcagaaaaaaataaaaaagaaaatgtgcaaatctacagaaagattaaaaagtaccctgtagttacagaaagatttttttaaaaaataccctgtagcccttaaacaatttctaacataatgtcctgttagctttctctctttttttcgtgaatcatatgaaaatcatttgcaaacatcatgacccttcacccctaaatacttctgtatgcatccttaggaataaaggcactcttttctatagctgtaataaaagtaacatacctgagaaaatgacaagaattctacaatattatctaataatcatgccatagtcaaaatctctagtcatcctcaaaatctcctttgtagattttttttggttttccagtccaggatccaatccagttttctgccttttagtcaattactcatcaaattattttttccagcaacttactagtaataatggtaatagccttagcttttattaataacaaccacttttcttttgaaatgttaatataaaactagatttattacctacataatcttcataatcttcaagttaggtattatcactactttacctaatgagggaggttatgctcagggtacttgtccaaggcacatagtgaggtatggttgaggtttgaactcagatatatctgatcccaaagccagctgtctttttctgtgctggactgactatactaggaaacaatcaatgtgaacttagaaatgtttgacccaaaagaaaaaaaatttcactcctattcataggctaaatgaactttactaaatatggaagattcctgtagcccggaagttgggttagttaacttttgagatctctgccaaccctgaaattctgtaacccttgtttcttacatctgcctcatacatggattaccaaagatgtatatgcatataatatttaacagttttattgagataaaattcacatactatattattcacccacttaatgtatacaattttgtagttttgtgtgtgtgtgtgtgtgtgtgtatttttgagatggagtctcactctgtcacccaggctggagtgcagtggcacgatcactgcaacctctgcctcctgggttcaagtgattctgtggcctcagcctgttgagtagctgggattacaggcgcccaccaccatgcccggctgatttttgtgtttcagtagagatggggtttcaccgtgttggtcaggctgttctcgaactcctggactcaagttatctgcccaccatggcctccccaaagtgctgagattacaggcgtgagccatcgcgcccggcagttttcgtatattgatggagttgtgcaaacaccacctcattcaattttagaacatttttatcacctgaaaaagaaacgctgtatcctttagccatacttcccccttcctccctaactcccccagctctaggcaaccagggatctactgtctatttagatttgtctgtttgggtcatctcatataaatggaattacataacatgtcttttgtgtgtggcttcaatttttttatttttttgagatggagtcttgctctgtcacccaggctggagtgcagtggcatgatctcagctcactgcaacttttgcctcctgggttcaactgattctcttgcctcagcctcccaggtagctgggattacaggctcctgccaccatgcctgactaatttttgtattttttactagagtcggggtttcactatgttggccaggctgttctcaaactcctgacctcaagtgatccacctgcctcggcctcccgaagtgctgggattaaagacatgagccaccacgcccagcctgtgtgtggcttctttcacttagaataatgtttccaaggttcatctgtgttgtagcatgtatctgtatcttatttatttttattgctgaatagtattccattgtatggataaactgcattttgtttattcattgattagttgttgatggacatttgggttgtttccactttttagctatatttacattactgcttgtgttttcatttctcttggttatatactaggagcagaattgctgggtcatatggtacttctacttttaacctttgaggacctgccagactgttttctaaagtggttttaccattttacattctcatcagcatatgtgagggttctggatttctctacatcctcaccagtatttgtctttgatcatagtcatcctagtgggtatacaggggtgtctcattgtgggggtttttttccccattggggttttgatttgcatttccctgatggagataaatatattttttgtgtgtccccccacaaactgcctggttctgatgagaccagtgttcttacagagaataactttgctttgaaacaaaacaaacaaacagccttttgacttgggtaacctttggagtatgttaattgtgatttactctggccttgtaacattgtaagtggagattttgtttaaaaactgcgttcgctgaaacaagtaataaggttcagacctattgttacaagttctgagttttctttcatataaatatgtttgttcttttgtgtggataaaacctaacgtggcaaaaaggtgtcaaacacctaagtattaaggaaactaaaatgaaaatgctgcatgaacagaaaccttgtccaattttcattactatagcaccatcacctataacagtgccagtgtacagtagatattacataatatttttgaatgaatgagtggaaaatgatatgcatttttctcttctgcatcctctgaaagatttcacaacgtgcaaagtatgtaaggctttatttatatacagataaaataatcagagtttataatctatgtatttactttcctgcatagaaactccatatgattaaaaattgagattatttattttaataacatgactaatcagtttacttaacctagaaatgaatgttatctaagaacaagcaaagaatgttagaagaatttagtgtttaggaattattattgttttccatctcagtcgtatatattttctgttttagccactttggagatttgttaatgataccaaagacaaaagaatgttagtttataaatctgaagatatcaagaatgtttcacgtttgcagtctccaaaagtgtgtggttatttaaaagtggataatgaagagttgctcccaaaagggttagtagacagagaaccacctgaaggtaagacttaaagagtgtatttcaaataagaaacaaacatactacaattgacttcagtaggggtggttgttatttgttaaaaaataacatgattgtcaagtaactatagtatttggcatgaaaataagaggtttgttccagaaattttcatcttcttttgtttataatgtaagagttgaaaactctggaaaataatgggaacaacagagattagactttaaaaaagattagggaaaagggaaatggagtgatctgagggaaaatattcctgcagatatttagaaatgataaaataatatggtggaaagacaatctttagagtttataagaaattaattggtagtaggagggacctatatatatactgcttagaatacaagaaggttatatccatcttgggacaatccatttagggtcatttaaaaaacgtaaccatcttggaattttactgcccaaaacacctctggttaggttttttgttttgttttgttttgttttgtttgcagcgcgatctcggctcactgcaacctttgacttccaggttcaggtgattctcctgcctcagactcctgagtagctggattataggcatgtgccaccaggcctggctaatttttgtatttttagtggagatggggtttcaccatgttggtcaggctgttctcaaactcctggcctcaagtgatctgcccacctcagcctcccaaagtgttgggattacaggcgtgcaccaacatgcccggccaaagacggttatgttattaaaattatatattagcattttaatatataaataaagaaattcttaatttatttcacaagaaagttgtcctattaaactaattttcaatgtgaatatcttgacatttttactgttacattggttaattcataaacttcttgttgtagaatatgactgacagcttcatagcccagcattaggtgactgttttactctgttgagcactatttatttatttatttatttagagatgaagtctcacttttgtcgccctggcttgagtgcaatggcacaatcttggctcactgcaacctccgcaccctgggttgaagtgattctcctgcctcagccttacaagtagctgggattacaggcgggtgccaccatatctggctaatttttgtatttttaatagagatggggtttcatcatgttggccaggctggtctcgaactcccgtcctcaggtgattcacccaccttggcctcgcaaagtgctgggattacaggcctgagccaacatgcccggccttactctgttgagcactttttaaagtttctgtattggaaaaattaaagaggcacttgtccttggttttgaattctacagtgttttaactttatgttacttttcacttttctgtcttcctccaaattattttttgttgttgttcagaatcctttagtgatattaagctcacataatgtttgtttcaaaaatatgttagatttaaagtgttaccataaaactccttgttttggtgaattttgatttaatagtgcatacaaattcatattagagcttgttcatcgagtgaaaagaagagctgacccagatcccatgaagaacacgtgtaaattattggtggtagcagatcatcgcttctacagatacatgggcagaggggaagagagtacaactacaaattacttagtaagtatttgatattgcatcgagtaattgaaaaaaaaatttgggtgggtacattccatgaaacttaatgcaaccagatctgttccagatactctgttatttccctaaaatatttgagggatattctctgaggtttttatgttactgtatggaaattatagtttcaaatttgtgacaacccattttacccttgaactaatattttctgcatgttagaatttatgcatatagggtttgggagaggttataatgtagtccttcctccttgatataagtgagttctttaaaaacatcactgctatcatggtagtgaacctgtggtgtcacatgtgaatgtaaaaatatgtatttgcatgaacccatgtttttcttttgcttatatgtatatttcagagaggaaggcgagttttgtttgtcatgttaaagacctaatcattggacttcacttgaaataggtgggactttcatggtcataactagttctagggcacagaagtgaaggaaagatgtaagaagtgatgatactggatttttaagtatgaactattatgatttttgaagtctggggaatcatttttcattgacattttttgctagtgtgacttcattcgtcatgattacttggcactgaccaaaatgttgttactgagggaataatggagaatgcagctattcatgaagcaagaagaagctggtgcagtaaagatgtctttctcattgccttgcttttcccatgctgtccattttattcataccctcccaacttctttcccttccctttcatgtcaagtggatttttttttttttttttcaacacagagtctcactgtgtcgcccaggctggagtgcagtggcacaatctcagctcactgcaacccccacctcctgggttcaagcaattctcctgcctcagcatcacaagtagctggaattacaggcgtgaaccacagcactcggccccatatcaagtgaatttattatgaggctagtaagagtcactgtgattcttgttcctaaataagagagatttttactttaaaaagcttctctcttaatctgggttttatattaaggggctcctcttattttacttctttgttcattgcactataaatatgaatataatgagagatctagtcttaaaaattgtatttttttacaacttcttaggcataacttgtttcacagttgctagaacaaacctcatcaacccagtttttgaacagtagaatattctctttgagaaaaagataggtaattagcattttgttctttctcatgtcattttccttggaaactatactgccttccttctccagttttcccaaatcagagaacaaaagaaggagggttgctgaaatgaaccttgttctttctggctgtcttcttacccattcctcagtgctgaactttttggggtgagagtgggggaatagggttggcagttgtctgccacggccccttacttgtttctggggaagacattcgaggtactcaccaagagatagagtgaagatggaattctttttagaagggaatacagttgacccaggaacagtgcgggggtgtggttagaagcactgaccttcttccctctgcagtcgaaaatcctcacgtgactttttttttttaaggctctgtcgcccaggccggagtgcagtggtgaaatcatagcttgctgcagcctctattgcccgggccaaagcaatcttcccacctcagcctcctctagctgggacaacaggtgttcacccttcctggctaagttttttgatttttagtagagatggagaatttcccaggatggtctcaaacttctaagcttaagcaatcctcctgcctcagcctcccaaggtgctgggattacaggcatgagccactatgcccggccactgtataactttgattctccaaaaatttaactactaatagtctactgttgaccagaagccttaccaataaaataagttgattaacacatttttaaaatatgtattattactgtgttcttacaatcaagtaagctagagaaaggaaaatgttatgatgaaaatcataaaaaaaaaaaaaagcccggcatggtggtgtgtgcctgtagtcttctgttactcaggaggctgaggtgagaggattgcttgagtccagaaattcaggctgtagtgagctatgatcgtgccgctgtactgcacccctggtgacagagcaagaccttgtctcttgaaaaaaaaaaaagaaaatcataaggaagagaaaaatacatttactattcactaagtggaagtggatcatcataatggtcttcatgttgagtaggctgaggaggaagaggaagagttgatcatattgtctctggtgacagaggctcaaggaaatccatatgtaagtggacacttgaagttcaaatctgttgttcaagggtcaactgtatttcaggtatactgattgacttttaaatttaatttttattattggctgaaacggtagttttaaaaaagcctgttacttgtcattttggttccatgtgcaattgagtacctgaaatttaggttaaactataccattgttttattctggtaacagcactttaagtttggggccaaaggttgggaatactctgatacagtaacatctcaatgctagtttttgcgaaagtagaaacttttgcaatggcctctaaactgagattttttctttccccatagattttatattgcattgccaggagaggtaaagagttacataatgtcttttttcttttttaaatacacacagatagagctaattgacagagttgatgacatctatcggaacacttcatgggataatgcaggttttaaaggctatggaatacagatagagcaggtatttatcaatagatatggcttatattacttaagttttgtaatgtaaatatttgtcacttgtattcaaaacctaaaaacttgtccttaacaataattgtaaataagttttctcagatgccaatgattttttatgatgaattgtgcagtatttttgatgttaattagttctagattgtgaagttttctgtccttagtctcgctttaggtagaaagccttttatgctgctgtgctttgttccttctttgaattcatggcctttatattctctgtagttttcttcccccctccgattatgcttaagtctttagttaaaactctggcatgcaccattgaatccttagtcagaaaatttactaaaaaatactgtgtacctttgcaaggctgtatttatatatacagaacctttaggttctttcctctcagatatctccttctgatttcttgtaatctgttaacagagtgtgtctagtaatgttatattaatgtcatcttaataatagctcatattaaaagttatttcaaattgctaggactaattaaaaaggcttctgacaaagggtattgctttgggcagagagacattttgatatgtaaattatataaattgttatctctatttttttccaagctttttgtagtaaaccatatttttataagttatatagtatagaatttagaggttgaaaaaatttttaaaaatcattcaccatgtttataaatgttaaactttgatattacttgtataaaactaagagaattatttttcccttttcattctctttcactgttacgcattttctttttaagttattatttgaataggtaacatgtacacagtacaaaagccagtgaaaagtaagtctctgcagcctgtttattgtcaaaccagttcctttccccaaagacattcatgtcactagtttcatatgtatctttctagagatgtcgtatgcaggtatagtgtatgtatatgtctgtatttgacacaacggtgctatgcagtacacttttacaccttgctttttcatttcacagtatgttggagagtacttcatgttcatgcatgtaaagctgcttcacttgttttattataaatagctgcatcatgtttgagtttcagggaacctgtaaattttctttttgctttaggcatttggaaccagtcgaagaaacaggaataatataggagattaaaacattaacttctttacatctgatgaaggatggattggagggtgtggtttagatgtgtatcatggtgggcttctaagtagttctatcccagatttgaccttgaccagccaccatcaaaactgcagagtccaccccagtaaacttaccacacagtggcagaggagaccagaatgggccttctctgcaggcaggcaggcaggcaggcaggcagagagactcacagaaactctgagctgagcatggtttccttctttatctcacacttactaatgggagcctttgttacttttttttttcttctttgcaggtttaatatgaatttgtctgaaatgcctgtataaggagaagactctattcttagccttttattcctttgatgcacaaagagatgtatattttattattctttcctgagttgtcgactgtagtcgtaataaatattttaggctcctgtaacccaagttcttattttttcaaaataaacatggaggatatgaaaatttaagagtacatttataatattataaataattcattgacatatgttttccataccatatgcttctctgtttgtttcaaacattgaatattggtactgaagaatttatgaattttggttttaaaatgttttttttctagaacgattctttttttgaacagataaaataatgcagtattcagagccttctgacttattttggaagtgttctaagtatatgatctctttaagtatagattcgcattctcaagtctccacaagaggtaaaacctggtgaaaagcactacaacatggcaaaaagttacccaaatgaagaaaaggatgcttgggatgtgaagatgttgctagaggtaggtcttagaatcctggatatggtgctaacaccactttgtcatttctgatatgtggattgtatgtgttttaatgaaggagcatgttagaaaagatggacacccagaagcagtctcctccagctgatccagcagtaaccccatcccatgtagcagcatagacaacaaataacaaaaactctatgaaaaagaaaaacgctataaagcaatgcttccttttttttttttttttttttttgagacagagtttcactcttgttgccctggctggagggcaatggcgtgatcttggctcaccgcaacctccatctcccaggttcaagagattctcctgcctcagcctcccaagtagctaggattataggcatgcaccaccacggccggctaatttttgtatttttagtagagacagggtttctccatgttggtcaggctggtcttgaactcccgacctcagatgatccgtctgcctcggcctcccaaagtgctgggattacaagtgtgagccaccatgcccggccaaagcagtgcgtcttaaccttaatatctttgaggatctaatgagacaatcagtggatcttctctagaaaataacatggatacccaatatatagagtttttgcacactgtttcattagttctgcacacttagttcagctctctctgaagcttatcaatttatcttttagggcagtaattatcaaacaggttatgaacatgtattggagagtagaaatatagcttggagatctgaaagttctctacaggaatttaaaatttttgtgtttttattctggcgattaatctaaagatggctaacttaatcattttatgtcatttggagtcttgccgtataacagggtgctgccatgtgattccagtgtcttgagtttgtgtgtgctattactttggtgtagaatgactttatatgaagcgatagtttttatcttttaatgtgttggcaagtttattagtttcttgttgttgctttaattatcacaagtggagcagcttagaacaacacttatttatcccatagtttgcatgggctagtccaggtatggtgtggctcatctggattcttgtttagggtctcatgaggctgaaatcaagttttcaaagcttcaatagaattaaaggatattataactattcatccagatggagaagcataatgtgcagcacctgtgtggtactcattcataccttgtctaatttgatctgctgagcaccctgagaggttggttgagacagcatccttgtgaggaggctcagcaagtgttactgtttattccagctgacatgacaaagcagcataggctgggggacttaaacaacagaagtttgggttttcacagttctggaagctggaagtccaaaatcaaggggtcagcagggttgatttcttctgaggccaaggtacttgtggtgtagatgctgtcttctccctgtgttctcacatggtccttccctcagtgtgtgtgtatattctgatctccttatcaggacaccagccatattggattaaggcccacccatatgacctcagtgtaccttaattacctccttaagggccctgtttccagatagagtcacattctggggtactgttgagggttaggacttcaacatttgaattgtggggtggcacaattcagccagtagcaggaagattaaatgacttgtctgattagtcatacaactggtgatggcagaggttgaattgagcacagatctcctgactcctagaacagctgaaccactgcgcctgtctgcttttctgtgagcctccagacagcccatggcaggggaggaaccaaagagaaaaatgacttatgttgacagatggtcctctccagttttcttccctaagcctcctagaatattcttagaagcctcatccttttaccacggaactatcagaatccccatgtaaccacacttcattcctcatatagggctctctggcctctcatttaaagcattttaaacattgagggttttggctaggcatggtggttcatgcctgtaatcccagcactttgggaggctgaggatgaggcagtggattgtttgagcccaggagttcaaggctagcttgggcaacatgttgtacaaaaaatacaaaaattagccgggcatggtgaggcacgcctttggtaccagcttcttgggaggctgaggtgggaggttcacttgagcctgggaggtcgaggctgcagtgagctgtgattgcgtcactgcattccagcctaggtgacacagcgagaccctgtctcaagcaaaataaatcaaaccccccccccaaattaaggtttttttaaacttggagacgctggacggttatggtagaggtttttaaagtaatgtatgaagcccttttaaattaagaaaaaaaaaatcctctcaaacctgcagtgttgatttaaatggatgtaaaatctttattttagtaacataaaactgggtatgtatgcttttctataagtgtatatttatataaatgacaatatattatgaagctcaaaaaagtttaagattaaaatttctataaaaccaattgaatccttgaaatacttgagagggatctgttttggcctggagtgctgcaatccccttatcgaattggagcatctctagtcctgggctgtatgtcttcagaacagccctcggaggagcagtgagttagttctgaagagctggagcaagctcccgaactattcccttttgtgtcccttgtcagatgacagtgtgtgcctctcacctgtgcaggtggagaagcactttagggaaagagcaaagcactgcacgaggttgtgattgctggtgctgagctgcatgccatcatagttctgttctggaatgtttagttgatttagattacatcttttagtctgatgtaattgttaatctaagaatgcttttttttttttttttttttttggtctttcaaagcaatttagctttgatatagctgaggaagcatctaaagtttgcttggcacaccttttcacataccaagattttgatatgggaactcttggattagcttatgttggctctcccagagcaaacagccatggaggtgtttgtccaaagggtaagtttttccatttcttgtgtgaatatgctgctgggattattaagatgattggattatattataattctgtatttaataagcaatttatctctgtttccttttgactttagcttattatagcccagttgggaagaaaaatatctatttgaatagtggtttgacgagcacaaagaattatggtaaaaccatccttacaaaggtatgttcttttatttctaaaagaatagtgttagagtttattgtagtagaacctcagttatatatttatgtaggtatttttttaaaaaatgtaatatatactgttttttaaatttctgcctaaataaaatttatgtatttttgtgggatatatgaaaattaaagcataaagaagaaaataaaaatggcctgtcagccttcttttgaaacatgtgaggaccactgcttttctcgaaccctctgtcctggacccctctgacctgcagcaactcttagagctccctgtctcctagtcctgcagtgcagctgtcattcaaggcatcccacaccctcttattttcagaaccccatggtctccctctttctcagtgccatcattttggtgtagtgtatcttgcaggagcttcctaagaaaacgtagatgacctgcatattgttgggatttcatatatctgaaaatgtctttattccactcttaagcctgattgataattttggctgagtatattcttagttctcatgttctctatggtcttctgtgcatgttgcttctaaagaatctgaagtcattttgagttcttatctttgtttgtcacctgtttttttctctggaatatcttaagatcttgtttttctccagctatgtctgttaaaatgtgtttgactacaaataacagaaaattaaataagcagtggtttaaataaggggtttatttgtctcagtcaacaagaagttcagggatagcattttctgggtggtacagcaactcagaggtaccctcagtggctcaagaacaagcaggaagtctttgtcctcatggatgtcacctcatggttttaagatggttctcttctgtgttggagaaaggaggagaaagagaacatggctagcctagtctggcccttctaaaaagcttctctggaggccccatcctggcttttgtttatatgttactggacagcactgggtcccgtggctgcccttagcctcaacggaatgtggaaagctggctattttagctgagtatattgctgtcctgggcaaaattagggctcattaagtaaggaagaaggggagagagatgttggtaggacatattagtatctgatatactgatttttaatttttatttaatttttattttttttgagacagagtcttgctctgtggcccagtctggagggcagtggcaccatcttggctcactgtaacctctgccttctgggttcaagcagttctcctgcttcaacctcctgagtagttgggattacaagcacctgtcaccacgcctggctaatttttgtatttttgttttagagacagggtttcaccatgttggccaggctggtctcatgaacccctgacctcaagtgatccactcaccttggcttcctaaagggctggttggtatactgattttttgactatgatgttatacttggtgtagggtatgggaaaacatttgcaaaagacacatctgagaaaagactgctatctgaaatatacaaagaggccgggcatggtggctcattcctataatcttcggcactttgggaggccgaggcaggagaatcacttgagcccaggagtttgaaactaacctgggcaagatggtcagaccctgtctctacaaaattaaaaataaataaataaataaaaatttccatatgtataaagaactgttaaaattcaacaataagaaaatgaacaacctaatttaaaaacagacaaaagagcagaacagatacctccaaagatatacagatagcagagaagcatatgaaaagatgctcagcgtcatatgtcattaggaaattgcaaattaacaatgaagctggttgtaggggtacatgcctgtagtcccagttgcttgggaggctgaggtgggaggattgctcgagcccaggagtttgagacccatcctgggcaacattagtgagatcctatttctataaaaaactttaagaaacccaacaacaatgtgctattactagtagcttattagaatggctaaaatcccaaacactggcaacacaattccaacaaggctatggagcaacaggaactctcattaattgctagtgggaatgcaaaaatggaacagccactttggaaggcagttggcagtttcttttctttttcttttttcttttttttttttttttggagacggagtttcactcttgtcacccaggctggagtgcaatggcgccatctcggctcactgcaacctctgcctcccaggtttaagcaattctgcctcagtctcctgagtagctgggattacaggtgcccgctgccactcccagctaatttttgtatttttagtagagatggggtttcaccatgttgtccaggctggtctcgaactcctgacctcaggtgatccgcctgcttcagcctcccaaagtgctgggattacgggtgtgagccactacgcccagccataagaatgtttatggcagcttaattcataattgataaaacttggaagcaaccaagatatcctttagttggtaaatggataaactggcacatccataaaatgagaaaaaaataaaaagctattaagccatgaaaagacatagaggaaccttaaaagcatactactaagtaaaataagccagtctgaaaggctacatactatatgattccaaatatatgacattctagaaaagacaaaaccatgcagactataaaatgatcagtgattgctagatgctgggggagggagggatgaataggtggagagcagggtaattactctgtatgatacttcaacagtcagtataagacattatgcatttgttgaaacacatagaatatacagcacaaagagtggaccctaacataaactgtggactttgggtgatttaaaaacaggtggtggcaggagcctatagtcccagctacgcgggaggatcacttgaggccaagagttagaggctgtagtgtgataaatgcaactgtgaatacccgctacattccagcctgagcaacttagcgagatcctccttttcttttttgagatggagtctcgctgtgtctcccatgctggagtgcaatggcatgatcttggctcactgcaagctctgtctcctgggttcatgccattctcttgcctcagcctcccaagtagctgggactacaggcacccccaccaccacgcccggctaattttttgtatttttagtagagacggggtttcactgtgttagccaggatggtctcaatctcctgaccttgtgatctgcccgccttggcctcccaaagtgttggaattacaggcgtgagccaccgtgcctggcctgagaccctgtctctttttatttatatatatatatatatatatatatatatatatatatatatatatatatatttatattttaaatttaagttctaggatacatgtgcacaacgtgcaggtttgttacatatgtatacatgtgccatgttggtgtgctgcacccattaactcgtcatttacattaggtatatctcctaatgctatcccttcccccttccccctccccccaccccacgacaggcaccggtgtgtgatgttccccttcctgtgtccaagtgttctcattgttcaattcccacctttgagtgagaacatgcggtgtttggcttttgtccttgcgatagtttgctgagaatgatggtttccagcttcatccatgtccctacgaaggacatgaactcatccttttttatggctgcatagtattccatggtgtatatgtgccacattttcttaatccagtctatcattgttggacaatgttgaacaataatgtagagtggtatgagaaaagaaaaagacactaattagcttttgggaatcttttaatttctttttttcttttcttttttttttttttgagatggagttttctcttgttgcccaggctggagtgcaatggtgtgatcttggctcactgcaacctccgcctcccggattcaagcaattctcctgcctctttctcctgagcagctgggattacaggcatgcgccatcacgaccagctaattttgtatttttagtagagatggggtttcttcatgttggtcaggctggctctcaggtgatccgtctgcctcggcctcccaaactgctggattacaggcgtgagccaccgtgcttggccttaatttctaaatttatttttttcttatggtactttgttttaggggaaaaaatctctcaaactgtgttttccctctattctcacatcacaaccatcatcatcaacacagaagacttgtgtgaccagaccaaacgtgtggggatttccccctacatatcaagcagtagacatcagctaggtgtcctccaattcaattcaaacactctccacccggaaatagtatcagatctcacagtttgagggcccagtcccacaagactgactgttccctcctccccaccagttacaagtctgagcctccagaacttctgaccaactggcttcaagttggggtttccacattctcctctttgggtctgattaatttgcttaagtggctcacagaactcagggaaaagcttaacttagtttatgggtttattacataggatattttaaaggatacaaagaagctgggtgcggtggctcacgcctgtaatcccagcactttgggaggccgaggtgggtagatacctgaggtcaggagtttgagaccagcctgaccaacatggtgaaacctcgtctctactaaaaatacaaaaattagccaggtgtggtggtgcatgcctataatctcagccactcgggaggctgaggcaggagaagtgcttgaacctgggaggcagagattgcagtgagctgagattgcgccactgtactggtcaacagagggagtctttgtctcaaaaaataaaaaaaaaagaaaggatacaaagaaatagccaaatgaagggatacatagggcgaggtctggaagggtcccgagtacaggagcttctgtccccatggagttgggatgtacctccctcctggcacacgaatgagttttgcaccttcctgtcaacctccatgtattcaaaatgctctctggaagctctctgaatcctgttttttgagattttatggaggcttcattacataagcacgaatgacaactgtgtagaaatgtgattggacaaaatgggtatgttctcatactaaccgactgagtggggaagcccaccaaggcctgtccagattctccttgacctctctgtgcagcattcctccctccacagtaaagggcaggaccctctctagaatgagaatgagaatgaggatctctggacccacaatcagattagagtcttgccttggatcaggtaaaaggaggacaggagaaggtcagagagagagattctgtttcctgaggattgctcctgagccctaaagcaccccaacattataacagaagaccgtaaccagggctacggagggttgtaagccaggagccatggacagaaacatacatgtgtgtacagtagctcacgcttttacttttttggagtcacaacttcttaatggcttgatttcatgacatattttctttggtcttccagaactttcctcttaaaaaaacacagcaaaaaaacaaaatttgatttgaaatttttgagatttttttttaagagtcattagcaaatccactaatgaattttccccaagcagttaggagatatttctcttcattacacctttgggatttgagtgcttttgctaaaaatttaagttttttttcccactacggttttaatatgaacatgtggaaagacttcttgtatagaaaaatgacttgcaaaatattattttttcaggttctatggagtgatttcccccccttaggaaaaaagaactcaggaattttaagtttatatgtatatatatttattttattttattttatttatttattttaagacagactctcactcttttgcccaggctgggggttcagtggcctatctcggctcacagcaacctccgcctcctgggttcaagcaattcttctggctcagcctcccaaatagctgcgattacaggcgcccaccacaatgcctggctaggttttatatttttagtagagacagggtttcaccatgttggccagtctggtctggaactcctgacctcaagtgatccagctgccttggcctcccaaagtgctggaattccaggcgtgagccactgtgcctggcctttaagtttgatattttattcagataaatatggaaaaaaaattttagctttattggcaaaatttattattcatatagaaatcatctgataatctgatagattaagtacagccctgcaactggattctaataaaccaagtcctctaggtcattaagattgttattggacatgaattcagtcattgagaaaataaaacattgttttgttgttcctcagttgtggtttttgttttttttttaagatagagtttcactcttgttgcctaggctggagtgcaatggcatgatctcagctcactgcaacctccgcctcctgggttcaagtgattttcctgtctcagcctcccgagtagccgggattacaggcgtgcgccaccacacccagctaattttttgtatttttagtagagatggggttttactatgttggccaggctggtctcgaactcctgacctcaggcgatcaacccaccttggcctcccaaagtgctgggattacaggtgtgagccactgcgcctatccgtactgttttttttaccccttgctttttttttcctttctgctgagatgctttaggttttaacagacatgtgattgggccgaggggcatgtgaggaggctggacaattaactacagttagcttattgcatttatcagcaccagattgtgtgtggttgaaatggccaaggtttgatgttttgttatgaatgttccagtatatcttataaattacattttcttaaattgatttgttactacttacaataatgtttgatagtattaaataaaatcctacttattctgttaaattcatataattggtagaagaatcatagtccggttattactcttttttgagacaaagtcttactctgtcacccaggctggagtgcagtggtgtgatcatagatcactgtagcctcagcctcctgggttcaggtgatactctcacctcagcctcccaagtagctgggaccacaggtgtgcaccaccatgcctggctaatttttttttttttttttttgagacgaagtctcgccctgtctcccaggctggagtgcaatggcgtgatctcagctcactgcaacctccgccccctgggttcaagcagttctcctgcctcagcctcccgagtagttgagattacaggcgcgtgcctccatgcccagctaatttttgtatttttagtagagacagggtttcaccatgttggccaggctggtctcgaactcctgacctcgtgatccacctgcctcagcctcccaaagtgctgggattacaggcgtgagccaccatgcctagcccacctggttaatattttttattatttttgtagagatagggtctccctgtgttacccaggctggcctcaaactcctagagtaaagtaatcctcccatctcagcctcctaaagtgctggtattataagcatgcagttcttattctcttgttgatctgattataaggctctatttaagacagcataggcccaactggcagaagtaggtgatggctggatattgagaaataatgttttctttgcatgatccttaaggaagctgacctggttacaactcatgaattgggacataattttggagcagaacatgatccggatggtctagcagaatgtgccccgaatgaggaccagggagggaaatatgtcatgtatcccatagctgtgagtggcgatcacgagaacaataaggtatgtgtgtgtcgagaattttttatgtggtttggaaagaggctgtgtataatgatcataatgagagctcagaaacgtattccattcctaggcgtttccctagggatggatgtgcaaattacaaagtaccttgaaacgtggttgtgtgttttggggtgaagcacggttcatctaaatctggttaaaactatcatttggactttgttgtcaagcttaatggtgtagatttgagctctaggaaaaattactaataataatggctttttttggagttctggatttcagggtctggtgggctcaggctttatgttaaaaatttgtcatttcatttacaagttgtcattcattttaactctacaatttacatgtacagtttacacgtttttattaacttttgcagttaaacacatagtttgcctgactacaagcctcatgggagaaaggcccttccttgtctgtcttattcatagctctatcttattcatagctctatctccagtgcctagtaggagtatctggcatgtaacaaatatttgttgaataattaatggaatcatttactattgggggtttctgatagagaatactagttgatttgtgatactgtaaaacactttcagagactttaagagtgccgtgactaactcttagagtctgaactaaaagttgtgttaataaatatctggttctttcattttatttgaagttaaacagcataaagcagtgtgaggaaaacaatagttgcactgctgagttaaagagggtcggtggggagagcttaaaggagtctgattctaatcacaaaagattgtgaagtatttgtcctgactcctattttgagcttggctgtgggctaatgtgcaagccttccctggacacagagggcaagattacttctgcttttccctggctctgacaccctgctttctgaaatttctgcctcctgttctttttgtgatctttgattgttgcatctcatttttttttggctttttatgtatattttctgcatctcattttctttggctgttatgtgtaaacagttcctctgttactttgcatgttatgttttatttttcctctgcttgacaacttgtgccagagaaacatttttctacccctttttgtctactcttccaacctgtcaaactgttgaattttccttctcttttcatagtctctgcatttctaatcatgttcactatagttcagtgctgcccaatagaactttctgctgcggggcgggggatgttttgtgtctgctctgcccagtatagtagccactagcccagtggagcaattgaaatgtggctagaaactgaggaactgaattgtaaattctattttatttaaatttttaataatgtttgcctgtgatgggagacgggaatgggcattaactgtaaaaggacatgagtgagattactggaaggatggaaatgtcctaaaattgacttatagcaatggtttcaacacttggtaaagttattagaaatcactgagttatatacttgaaatggatcaattttgtgatatgtgaaatatgtcttaataaagttgttaataagccaacaaacaaaaacagcagtgtgggagcagaggaaaagtagcgcggatgtagaggagctgtgaagtcataagttgattattgttgaagctggtgaggggcacgggggcattcatgataccatcctgtctacttcatagatgcttgaatatttctgtaatagaaactgtaaaatatgtgactaggaacaaaatttaagtagccacatatggttggtggctaccatattgcatactgtttctctaagtaataggtcatatgcttcttggttatgaggatagtgtcagaacttgggagcaaaatgttttactttgcagactgcctgggtggacatgcatgctgctgactcttcctgctgccagttctggggctcttcaaaacagccctgtaagaacttgccagtgaggcatggtggctcacacctgtaatcccagcactttgagaggccgaggtgggcagatcacttgagcctaggagttcaggatcagcctggacaacatgtgaaactccatctctacagaaaatacaaaaattagctgggcatagaagcacatgcttgtagtcccagctactcaggaggctaaggtaggaggaacccggggagttcaaggcggcagtgagccaaggttgtgctactacactccagcctggatgacagagtgagactttatctcaaaaaaaggaaaaagaaaaaaaagaacttgctaatgagaatggggcctgggaagaactttttttttctggagctgccagtctgtatcaatgaagaacaatttatttattttgtcctgagcacatcatatttagtctgtgtttttctagtttggttgcccaagtaggagtccccttgtaagaagataatgtgcatcttctatgttttatttatttattattatttattatgattttttgagtggagtctcactctgtcgcccaggctggagtgcagtggtgtgatctctgctcactgcaacctccacctcccaggttcaagcgattctcctgccttagcctcctgagtagctggggttacaggtgcatgccaccacacctggccaatttttgtagttttagtaggatggggtttcaccatgttggccaggttggtcaactgactggtcaacaaactcctgacctcaggtgatccacctgcctcgacctctcaaagtgctgggattacaggcatgagctgctgtgcccagcctatgttttaaatgaattccttaataaaaatatttttaactgatgaaaagggcttacaggacaaaaataaagtagttccttgacctagaaagacagaacccatcaccctctactaggcaagcctatgaagagcagtttgccacaggtggacttctctgtggacagatgacattagtgaaaaggaatgtaggacctttgagattgtaacttcttaggaaggtttgctgaacggaagaggaagtcttatgacaaggatgcaaacagaagctgccagatcttcagggatgtgtaggcagaaagccagagttgcgggttggtccttttatcgttagtgctctccagctgcttgggagttgtaactctgacaaatcagtgaagaggtcttcttatctgttcactgtgaattttaactccattttaacctgataaaatggaacccagagatacatgatgttgatgaataaacccaccaaaatgacaactgcctgaggccccgattagaataaccagaccccttagacatctgtactgtaacgacagatttgggccgggcgcggtggctcacgcctgtaatcccagcactttggagaccgaggtgggcagatcatgaggtcaagagatcgagaccatcctggtcaacatggtgaaaccctgtttctacaaaaaatacaaaaattagctgggcgtggtggcatgcacctgtagtcctagctactcaggaggctgaggcagaagaatcacttgaacccgggaggcggaggttacaataagccaagattgtgcctctgtagtccagcctggtgacagagcaagactccatctaaaaaaaaaaaaaaaaaaaaaaaaaaacagatttgaagatgttttttaaaaagccagttagtatttctgtgtaagatgaggtctttgctatctttctgaaagtagctcctttggtgtctgatttggtggttacaggcacctttggagggtctcatacacttggctctcaggggcttcatgattgttgtctggggtgaaagtgaagccattttggcatctgcagagcactttggagaccccgacctaagaagtaactatgctcagttttccctaagcctcttctttttttgataacttcaggaggtctggaaaatgaccgcagttttagagctcctgataaaaccctcagccttaaaagggagttatcctagtggttctgtactccagggtgggaaggtagtgtagagactttttgagacactggtcttgctggttgatgaaaatgtttaggtaacaattggggatttaatttatataaaatgtactattatgcctattactaagctcaaatatttaaacaactttaaacttggatcatccatataagtagccaaagaaggagaagaaaccccttctcctgcatttctgaattgttttgtctgggacaacattaacctacagaggttcttaattcttgtcactgcatgagtggcatgcctgaggtgaggagatttcaagtctgatggagctacgagctctctgttgtgctattctgcttgtccttaagtgggctttgactgggatgtttggtctcagtatttgtatagcttgcttaccttcgtaagaagaattatagatccttaaccaagttcacatcagccatttagcattctatggagggaggttcccagttccatatcagtggcctttggaggagactgtggtggccttgccataactccagggtggctctgatggtggttttacattaagagtttgtctctagagaagacacaaacattgcatgggaatacatttttatgatattattttgggtccttattgccttttttctctcaagatgttttcaaactgcagtaaacaatcaatctataagaccattgaaagtaaggcccaggagtgttttcaagaacgcagcaataaagtttgtgggaactcgagggtggatgaaggagaagagtgtgatcctggcatcatgtatctgaacaacgacacctgctgcaacagcgactgcacgttgaaggaaggtgtccagtgcaggtgaggagtctctccacagggattttgggaagttggtataacaagatgtccaaaataagagaagactgaacttgcaggggctttagaatcaactgaaaggggtgtgagtgtgtttgtttacatctacctcttttgcccttcacagcaagaaattgctttctgggcctggcacggtggctcactcctgtcatcccagcactctgggaggctgaggtgggagaaatgcttgagaacagcctgggcaacatagtgagacactatctcttaaaaaacaaaaaacaaataagaaaagaagaagctttctggaaagcagtgtgacattatgtaacaaaatccttgaccttgcatgctccttggtttagcagtcctatagttaaaagaatcttttttttttttttttttcctgagacagagtcttgctctgtcgccaggctggagtgcagtggcgcgatcttggcttactgcaatctttgtctcccgggttcaagtgattcccctgccttagcctcctgagtagtgggactacaggcacgcaccaccatgcccggctaattttttgtattagtagagacgaggtttcactacggtggccaggatggtctccaactcctgaccttgtgatccatccaccttggcctcccaaagtgctgggattacaggtgtgaggcaccgtgcctggcaaaataatcttttttatttaatttaatttatttatttattttgagacggcgtctcgctctgttgccaggctggagtgcagtggcgcgatctcagcgcactgcaatctccgcctcccaggttcaagcgattcccctgcctcagcctccccaataactgggactacaggtacgcaccatcacgcctggctgattttttgtattttagtagagacggagttttagcatgttggccaggatggtctcgatctcctgacttcatgatctgcccaccttggcctcccaaagtgctgggattacagaggggagccaccgtgcctggcctttattttctttttgagacagggtctcagtctgttgcccaagatggagtgcagtggcatgatcatggctcactgcagcctcaacctcccaggctcaatcagtccttccacctcagcctcccggatagacaggactacaggtgtgtgccacctggctaattttttttgtattttttatagagatggggttttgccatgttgcccaagcttgttgtaaagtcctgggctcaagtgatccacccttctaagcctcctaaagtgtggagattctaggtatgaggcaccatgcctggcccaaataatcttttatttctttttttttttttttgagacggagtcttgctctgtcgcccaggctggagtgcagtggcgtgatcttggctcactgcaacctccgcctcctgggttcaagccattcccctgcctcagcctccccagtagctgggattacagtgtgcaccaccacgcccagctaatttttgtgtttttagtagagatggggtttcaccatgttggccaggctggtctcgaactcctgacttcgtgatctgcctgcctcagcctcccaaagtgttgggattacaggcgtgagccactgctcctggctgcccaaagaatcttttgggcaacagagataagatttaacaagggtataagatttaacaaggtttttttatggctacatcctaatagcaaaattttggaaacaatcaaaatgacagtcttgggatatgaatgttatcatgattctatatactggaatagtgtggaggaagtaggttacaagttagaaagttacccaggttttcattttttatatacactgatagaccagtgcctggcttagaagtaaaagggttaaacttcagttttctggtgaataattgagatttaactggatacagtgcatattaacgctgtaaatactgatggggagtagagttctggctgccgagtgtcttagctatggattgccttgtggccccaccttgtcttttttttttttccttgtctttttttttttttttgagagagtctcgccctgttgaccaggctggagtgcagtggcgcgatcttggctcaccgcaacctctgccttccaggttcaagctattctcctgccttagcctcccgagtagctgggattacaggcatgtagcaccatgcccggctaattttttgtatctttagtagagacggagtttcaccatgttggccaggctggtctcaaacccctaacctcgtggtccacctgcctcatcttttttttttttttttttttttttgagacagaatttctctcttgttgcctaggctggagtgcagtggtgcgatctcggctcactgcaacctctgtctccggggtccaggcgattctcctgcctcagccttctaagtagctgggattacaggagcgcaccaccacgcccagctaatttttgtatttttagtagagatggggtttcaccatgttggccaggctcatctcgaactctcctgacctcaggtgatccacccacctcggcctcccaaagtgttgggttgggattataggtgtgagccacctcgcccagcccatcttgtcttttttaaattaatgcgttaaatgaatgaaaaccaagggcaccaagatgtttcacaggtgattgctgtgttcccattcttttctcctatagtgtggcatttatgtgacctcacgcacattaggaagggacaaagtgtgtgcaggtagctctagcagcggagatgtctgatgatgtaggagtgggtgacggagccaggaggtcttccccggtgatcttcaggtcactgtaacgtaactgtagcgtttgatttgatatggggccataatttgaattgctctgttcctgtctgctgttcttctccagtgacaggaacagtccttgctgtaaaaactgtcagtttgagactgcccagaagaagtgccaggaggcgattaatgctacttgcaaaggcgtgtcctactgcacaggttcgtgttcttgttgcttccttggaatgctgtgggtcaagtgtgtgtgtgtctttgaaaaacaagattatgttttgttcagatgagagacaccttatttttaatctcatatgccgggttgagtttctggcactccttagtttgtgacacttggctttggtgggtttaagacctgtttctatttctctttcatttccatcactctcctctttctcctcacagacatccactctactgtggttaatatttgcctggatatgtgtatatccttgaaagatcatatagtgttattttgtgcatgtatgtgtttttaatgtgccaaaatgatattctaccttaaatttacttttaaaaaattcagtatcatgttttaaagaattacccatattgtgctacagataatataacaaggtttttaatggctacatcctaatagcaaaattttggaaacaatcaaaatgacaatcttgggataatgaatgttatcatgaatctatgcactggaatagtgtggaggaagcaggatacaagttagaagggtaaccagtttttctatatgtatctatatgtatttcactgttggggacacctacatattgtttagttatatgattggctgtgttttacttacaagtcaccaagtggtagctacttccattgccttcatccccttgatattccagataggacacagatcacatcctcctacgtcccttcaggaacctgtgtgtttctctgggtactgaggagtgtcattgtgtagtcacagaggcaggatgtgctggtctctagagcaccactgctaggttgcctgtgtctgaggactccttatcctgacgttctggccaacgcttggaattaccctgctgtcctattagcatgatgagtataaagtaatctcttgttcttacttttttttttaacagcccttgtcctaatgcacttacttacatttttcttgagcatctctttatatttttcagctattcagatttctcctgtgaatagccagttcatatatttggttcattttttaaaaattgggtttcatgttatttcactactgtgaatttggaggagttcttatgtaatcatccatttgggcatacgtctcctatctgttgccattctcagaacagaaatctttaacgtaatcaaatccatcattttgttgtgtgtgtgtattttttaaacacatggttcagaaaagccatggcggatggttaaaaagatattttccacagctgcttctattagcttcataagttgtccttttacattcaggacttgaatctttctggagctaacctttccaggtgtccagtatcttttgttcggtcaattgttgctttaaaaatttcaaagctatgttattactaggtatataaacggacatatctctacatctttatctgctgttccttaccagtatataatgttccttttttacccttgcgatgttttttgacttaaattgtcaaaaagcaatattcagtttgctattctagtttttttgttcctctgatatatctatctgtcccattcttatatttttcaaaatttgtctctcttggttggttggtttgattttgtaatagctttattgatacataattcacactcatgtagtttgcccatttaaagtgtacagtttaatgatttttagtatattcagatttatgcagtcatcacaattaattttagaacatttacattactccagaaagaaaccctgtatcctttagctatgatcctccaatccccccattccccacaactcagagcaaccactaaccaccctattctttatggagttgtctgttttgaacatttcatataaatggaattatacaatatggtttcgtgaccacatattgtatgactggcttctttcactgaacatagcatttttaaggttcatgtatgttgtagcatgtatcagtacttcatgtacttttattgctgggtaaattccattgcatggatatgccacattttgtttattcattcattggttgatagacatttgggttgcttccacttttttgctataacaaataatgctgctgtgaacatttatctatgagtttttgtgtggacagttcctttggatattattcaggaatagaatttctgggtcatgtggtaactatgcttaatcttttgaggagctgtcagactgttttccaaaatggctacaccattttacagtctcagcagcattgtatgagggtcccagcttctccatatcctcaccaacacttgttatcttttttattgtaactatcctaggttttgtgataaggatgcaaacagaaagctggaggtcttcagggacctagtgaatgaagttgtgtcctattttggcttgattttggttttccgtgtgcatagtatgacatgttgcccatgtttttatcttttgggatctgtcactatcacattactttgccaaatgttaggaacctgatggcccggcacagtggctcacacctgtaatcctagcactttgggaggccgaggtgggcagatcacgagatcaggagatcgagaccatcctggctaacacggtgaaaccctgtgtctactaaaagatacaaaaaattagctgggcgtggtggcgggcgcctgtagtcccagctacttgggaggctgaggcaggagaatggcgtgaacccgggaggcggagcttgcagtgagccgagatcacgccactgcactccagcctgggcaacagagcaagactccatctcaaaaaaaaaccaaaaaaacaaatgttaggaacctgaatatctaaatcaagctttaaagaagcatttgctagctatgctcaatgtttcatcttcactgtaataataaaatagattgagaaaaatgctttcttttaaataaacgtaagtaaaacaatttgaaaacgtttgttcttatcaaacagccttttgttcccttgatattttatacaaaatagtagatagcagaggataagttcctgataaggaatcagtattttctagcaggaaaagctagagaacaacaacctcaaaaaaaaaaaaaaaaaagaagaagaaagaaaaaaagcaattagcatttcacaaccagcagcagcagcatcacctgggagcttattagaaatggaaattgtcagtcccctccctggatctactgcatcaaaaaatgtgggaagggaggccagcagtctgtgctgtgtaaccttctgtcaggtgatttccatgcatgctaaactttggggaccatgctagatagatgataccattttcagaattattttcctacctgtctaatactctgactttagtcttttaagaacagatgctcaacagatatttattgagcattttttaatgtatcagggcagtatcatataccaaaaatacaataatgatccacaatataaaccttccctgagctcactggacatcatactttcagtaatagtttgttaaatgactgttgacatgatgaatgcccagtgctcatgaaaggttttatgagaaccagaggcaaagtgcctggttatctgttgggtacttaataaaccatcacttttgtttgaaactggccagattttctgtacattttgtgttactgctctgaaaccctctaagtcagaattcttttgattggcttcattcttcagctgaaaggccagtccagagctgtggatatatagtccattgctttcataaagtgttttttttctcctcctctatttgtgttgacttttagctacttgtgctattcattttccagaatgattcactcattccatcctgtctctcccagtttaactttctttggtgggttttctttggcattattggcctgggcacagtggctcatgcctatcattccagcacttggaaggccaaggtgggaggatcccttgagcccagcagttttacaccagcatggtcaacacagggagatctcgtctctcaaaaaaaaagaaagaaaattagccaggtatggtggcgtacgcctgaaatcctaggtacttgtgaggctgaggcaggaggattgccggaacctaggagtttgaggctgcagtaagctatgatcacacccctgccttccagcctgggtgacagactgagaccctgtctcaaaagaaaaataaaaagaataattgatttatttaagaaatatttgtagtatacctataatatgatagggattggagataacttaatagatttgatcattgctgtcatggggctttccagtctagtagagggaaaacagaaaataacattaaatatatatatataaattgcaaaacatatgcaatgaaggagagaaggagtgtgatagtgcataatggaagtgggaggccacatcaacttagcatcctcagggatatctcagaaaacctttgagacaaaacttaatccataagaaaagccagctaattgccccaaaagagtggaaacaccagcattccaggtagaaggaatagtatctgttaatattgaaggaactgaatggaggttgtcatagccaaagcagtgggctgtgggagagttgtgtgcgatgaagtcagggccagatagggaaggccgtggagttcttttaagccttcatacaaagtttgcaatttattctaagtaatagcacataggatattcttttatatatgactgtgagatgcagaagtggagaccatgcattctaactggggcttgggaggccagggactcatgcagcctagcctggcacatagccaggcactcccatttaaatgctgattgctggtgagatgcaggctcttgtcctagctctgtaggtcactttttgcttttgcaaggtaagatgctcacttgtatgagaaacagcgtattatgcacctgtagaactggtggacctgtgactcattctttttgttatgactggtgtttgcttccaggtaatagcagtgagtgcccgcctccaggaaatgctgaagatgacactgtttgcttggatcttggcaagtgtaaggatgggaaatgcatccctttctgcgagagggaacagcagctggagtcctgtgcatgtaatggtgagcagttttattcccagtccagcagcaggagaaaacatggcctttgtctgccaggctcccttcctccatttggaggttgtgcgaatgacagcagtggtgagatccaagccgaggatgaggggatggggaagggcagggtggtgtctggagacaggcatctctgcatgcagatccaccatacctgggagacctatcctgttggtgtttcttcttgctgcagtttcaggccatatggcaggctttgaggtgggagaggagggaattttgttgggggtgagtgggtgggtaggtagaggtgtgtcctagccttcctctgctccatatcatacaaaccacaaaagcagcagtagctatctacattacattggcatggaactaggatactcctgcaacaactccaccagagagagctgattccaggacctaaccccactagatgaggatttttgcagttatcaagaaggctgggtctgctcccctctgatctcttagagcagcctggggcaggagcctctctcctgctggcctgtcagttttccttaggtttctgtgctattttggaacccctgggtttgagggcatcctcatggactggtcagggactggctggactctgcttcccaccccacttaaaccatgggagtcgatgagggagttctcttgctttcaaaatagacagagagccaggtgtggtgactcacacctgtaatcccatcactttgggaggccgaggtgggcagatcacttgaggtcaggagtttgagagcagcttggtcaacatggcaaaacgctgtctctactaaaaataaaaaaaattagccgggtgtggtagcgtacacctgtaatcccagctgctagggaggctgaggcaggagaattgcttgaacccagggggcggaggttgctgtgagctgagattgcgccgctacactctagcctgggcaacagagcgagactccatttcaaataaataaataaataagtaaaaaataaaataaataaaagacaaagaacccggtagttaaataaaatcactgggttggaagctcaccatccatacagtggagtgaggaactcttccaagttcaataatgtgtaggtaaagaagataggttgagggcagtgtctcacatctataatcccagcactttgggaggccaaggtgggtggatcacttgagctcaggagttgtttgagaccagcctgggcaacattgtgaaacctcacctcttaaaaaaaaaaaaaaaaaaggtaacacgtagcagatgccaaataaatctgttgtgttgaatgccaagaggcttggggtgctctggaaggacagagcccgacacagtaaaagtccaagaaatattttataaattagtgaatgatgaaaaggttttctttttttttttttgagatggagtctcactctcgcccaggctggagtgcagtggcgcgatctcaggtcaccgcagcctccgcctcccgggttcaagtgattctcgtgcctcagcctcctgagtagctgggactacaggcaagcaccaccacatctggctaattttttttatttttagtagagatggggtcttgccatgttggccaggctgttctcgaactcctggcctcaagtgatctgtccgccttggcctcccaaagtgctgggattacaagcgagagccactgctcccggccttttctgaaaaggttttctttttgcttgtttttgtgttctagttgatttctttttctcctaagtatggtttaattttctggcatttctgccattcttatgtatgcccacatggctcacagatgcccggtgttttatcctgtgacctgtcagagctgttcttgggaggagttgtggagctttggctgcagggctcatgctcctggggtcactgagctccccacccaagggtggacagttgtgtcccagctgctctcgctttcagggagccagtgtgggccctgaggggcacactttagactgaaaaaccaaggattgaagtcagcagggtgacaagaaagttgggacaaagggaagcatttagaagagcattgtgaggggcttgaaggggagagaatagttagactttgaagagaggtcttgaatctagaatggatttttctctgcatttttttttaaaccttgtggcctctgtcactgaaggctgaggagtgtgacctcagaaactactccttggtgggggctatggatagtattagctatttaaataaaaaataaatgtgatttcttacctctttgggagcatggtcagggaggaaagaggaggcaggaggagaggcaggtctcagaacaatccagctgtcaatgcgtgttctctgttccagaaactgacaactcctgcaaggtgtgctgcagggacctttctggccgctgtgtgccctatgtcgatgctgaacaaaagaacttatttttgaggaaaggaaagccctgtacagtaggattttgtgacatgaatgtgagtatttatgtacagctttttctgtaacagccagataggaagtttttattttgtaagtacttgattttgcagatgaaaacaaatcaaaacacaagtggggctacatccttctggcccattgttatctacgggtattacttaggaggagaagacggagtgctttcaggtccctgcctgtagtttccttctgtggtgggaggctttgagcccagagactgagaaggactggggtggggactttatggtaaagttggttggtttcaggcagtgggtcctaattatgttttcctagattacttacagaactgactaagattgcaaaattattcagggtgtgattttgaaacaggtgctgaatgagtaggaaagacctagaaggctgcttgacttacttaagccagacccttttgttctctagagaagcataatttttctcatgcagaatgatgggagagggttttaagatttacgaggcttcacagggagtctggctgtgttgttcactgtccactgtgtatgtgtagagtccttactggaatgcctcatctttagcaaactggtttccttgatttttgtctcctggtaattctaaatcacttgtaaaaatggagtaattatgaaagtgttaatgacagatgttctactttcttgggtactcattacgcggaagttattgccttgtgtcaaagatgggaaaacgtttgattttaatgaagccctttacatgtcagttatttttataaagctacattgcttctgaatacattgtgtttgggaatgatgctgtatgtatgttttttcttcatagggcaaatgtgagaaacgagtacaggatgtaattgaacgattttgggatttcattgaccagctgagcatcaatacttttggtaggtgatttccccagattacttactgagagctgagtcaatttctgtgatgacattagaaaagtgtgctttcagagtgatgtgctttaattctgcagtagaaggtggaactattcacagctttagttatgaaacaactttgttggctagaataaaatgaactcatagatagtctgtccccgtggagcttggatgcacagattttctgacaagggaaataaagtcaaaatactggcttccttctttacccaaaaatatccatgtgattagcataagcatagtttaatgctatagactgaatcctgattgatgtaagagtgtttatttgactgaatgctatatactgaatcctgcttgatgtaaaagtgagcctcatattttgcagaagcagggtatatcatgttgtcacgagtccataatttaatcacaaaaataatatccaggtaacaaaaactttgtcttcttaagcatttactagtagtagcattccatattaatctgttgacacagctactccaggtaacatgttgaatattctgcaatctcttcctgtcagccagtatatgagggctatttctttaaaagcacttggtatggagagatggtgtggtgtaatacaggcagcacagacattctgctctcggtagtatgtctagccagcagctctggcatttgacacaatggtaatatcctaagagcatttcactttagatttgtgaagtacttggtcaagacattaactgtttggaattgttcacaggaaagtttttagcagacaacatcgttgggtctgtcctggttttctccttgatattttggattcctttcagcattcttgtccattgtgtggtaagtcatcaacttttaagtaattaaatgttttatttaaattttgatcaactccaaccatgtaatctctggaaaaggtaaaacttgttcttagcaaagtttggcctgatatttccaatagctttttttgttgttattcctaggggaacatgtcttgtagaaagcttaactaatggtcttttaaaaaaaatactatttttgtgtgttggtgttttaatatataaatttcttaggaattttatacttttaagcataggagactgtttaactggatttgtccaggtcctttgatgagtaaagcccttattgaagagcattttcaggctgacttcgttgcaatagagcaaatatcaaacatcggcatttcagatgttccccatatatcatgtagattattggcagcagatggctatgtcttcagccttctgcacaaataggatgtagggactggggcccagctgtcatatagagtatttacatcttccccaaaaaataagagtaagcagtcttttctgttctcattcagaatcagtaacagctacaagttgaattgggctttgactaaggaactcctggtcctttataaatttgaggccctttttcataaatgttcttacgaatccattcacttgcatctgtggggaatggggatttgtctgctgtagagatgagaaagtcacacccaggcttccagacttgttttcccaaactctttcatagtggccttcctatgagcatttaaaaattccagcacaactctgatgacaaaggagtttttcctactgcctccttcctttcctttcctgctggcttctcctgcctaggggccatctcacagagcagctcttcctcagggtggtgagcatgatgggtataggaagatctctagggagcacttgtgctgaagaaagctgaaggtgacgtgcttgaagctttgacagatgtctctggatgacagtgccatccatcacgattgcttctattggaggatggaacctattttgtttacagggaagttgcacatgtggacaaggcacgacccttgatttcagagcaaagcctccgataggagggagggccatggcttgtttttggtcatagaatgcattgatggcacccagacaggaagcctagtcctggattcttggtccttgccctctgtcacctattatgcttcagccacaggcagggatggggcagcagatggccatgtggttagccttctgcagaagtaggatgtagggattgaggcccagttcctccagcagagcatggtccacagaaactgtggagacagctaagagagtgaggccatgggccggggcagtgcgaagaatgctgcaggcccagccacctgggtcttcctaccagttgcccttccagtcagtgcggtcctggtgtacccagcatctgggacatttgtcatttcatgcacaggaagatgcctttattattcccctgcccacagagggataaatttctcagaaaacatagcacttaaaccttgcctctttctgtacttaacgccaaaatgtatttcctttgagtgcaaaggaaacacttctagactggtggcataactaaagcttgggtgagaaatggattgtcatctgttgagcctgctatcactttctacaactcaggttctaagttcttcagttagtgttaggaatagcctgtgatgaaatagtactcactaactgaattgtatttgtagggaatgaccttcttgctgtttctttctaggataagaaattggataaacagtatgaatctctgtctctgtttcaccccagtgtaagtataccatatgaaagaaacataatcttcgcctggtctgaggccctgttaggcaaagaccttcacctgacccagcaagagctttcactggctgatggaaggtcatgttgcagcaggaagggtctaggttggaatgtttacccttctgacaacagtgatggtgaacttcgattagttgcatggatggacatttaaagagctgtgctgtccccttcccaagccataaggagtgatttagccattcaacacttagttaatattttgagttcaatttctctcttgggatcttaccttgagaggtttgaatcctcttttgggtcttcaaatggtaagtaagttttcaggatgcttgaaagctagtaattactgtttttgccattaaaagtaatggcattaattacttttgcaccaacctagtattttttagtcacttaggttgagtgagcctcacctagcacttttttcttagcatcacagtgccaacagaataagaggctgtttgatgggtaagggtggagctgtgaggacctccgattcatcttttattcctatcaatcaattgaacccatgtctttgcagaacgtcgaaatgctgagcagcatggattctgcatcggttcgcattatcaaaccctttcctgcgccccagactccaggccgcctgcagcctgcccctgtgatcccttcggcgccagcagctccaaaactggaccaccagagaatggacaccatccaggaagaccccagcacagactcacatatggacgaggatgggtttgagaaggaccccttcccaaatagcagcacagctgccaagtcatttgaggatctcacggaccatccggtcaccagaagtgaaaaggctgcctcctttaaactgcagcgtcagaatcgtgttgacagcaaagaaacagagtgctaatttagttctcagctcttctgacttaagtgtgcaaaatatttttatagatttgacctacaaatcaatcacagcttgtattttgtgaagactgggaagtgacttagcagatgctggtcatgtgtttgaacttcctgcaggtaaacagttcttgtgtggtttggcccttctccttttgaaaaggtaaggtgaaggtgaatctagcttattttgaggctttcaggttttagtttttaaaatatcttttgacctgtggtgcaaaagcagaaaatacagctggattgggttatgaatatttacgtttttgtaaattaatcttttatattgataacagcactgactagggaaatgatcagtttttttttatacactgtaatgaaccgctgaatatgaggcatttggcatttatttgtgatgacaactggaatagttttttttttttttttttttttttgccttcaactaaaaacaaaggagataaatctagtatacattgtctctaaattgtgggtctatttctagttattacccagagtttttatgtagcagggaaaatatatatctaaatttagaaatcatttgggttaatatggctcttcataattctaagactaatgctctctagaaacctaaccacctaccttacagtgagggctatacatggtagccagttgaatttatggaatctaccaactgtttagggccctgatttgctgggcagtttttctgtattttataagtatcttcatgtatccctgttactgatagggatacatgctcttagaaaattcactattggctgggagtggtggctcatgcctgtaatcccagcacttggagaggctgaggttgcgccactacactccagcctgggtgacagagtgagactctgcctcaaaaaaaaaaaaaaaaaaaaaaaattcactatctacaaacctagaatatttaaaatacaaagattgcctgttttcaaacactattgaataagagggtgagatatttcttaacaacaacaacaacaaaaaaaacaggttgttttgaatgtgatgagccagccaggagatagaatactacctgcccttagggttgggggctgtccccacaagacttgatacttcagaaaccctttttattgacccacaagcagatatttgaattacttcttactttattgctccaggattctggatgggctgcatttactgtgtgaaggataaaaatcattagcctggattctgatttctataaattgccattaaaagctttttttcccctaagaactgaaatgtgctcaccagccaaaacattttaacttgtaaattttgagggcagttaaccaaacctgtgactaatcatatctcctcctaccccccatttccaaggacatttgttactcagatacttgttatactaatacttgaacttgtaccttatggtatttgctatcttttaactagtcatgatattcttatactttagttacacttttggaatttgatacaaggttgagtggggtgtgtgggtgtatgtatgagtgaaacagttctcaaaagaatgtaagaaaaaccatttttataaaattgtgactttttaaaaacatagtctttgtcatttatagaattaacaagctgctcagggtatattttatagctgtagcactgatatctgcattaataaatactgtcgaaacacaa

SEQ ID NO: 53 - DNA, 121104 bp, Homo sapiens
  source 1..121104: mol_type = genomic DNA
acggagacggaccacagcaagcagaggctgggggggggaaagacgaggaaagaggaggaaaacaaaagctgctacttatggaagatacaaagggtaagaccaaaattgatttgatctgaatccttaagaaaaaaaaaatagaaggaaaaataaaagcccagaccaaaaagcaagtacttgaaagctggaggcaaaaagccctgaatgaactttcccaccctcttccttctgagaggaggcagagaaagagctttgggaaactttttaggaagcagagtccagggttgcagtcaagggtggctctagagcaagctggaggggctcatgaatattcattatcaatttgtattcagagttggtttttttagaggcaaatgactttttcagtccccttgcagtttaagaggcagctgcctcatctgcagtccggactcatctagcctcgggtctgtacctcagggtgtttgcttgaagatgctgggctctgcgtgtagatttgttttgttctcgaatttcttgcatgctttcctgttgtgaaattagcaaaggcttctttgctgggaacaagacagagaagttaatgtggcacaaggctgtcacaacaggaccccagagtatgtctttcaaaatgctgaaagtttcttgagatatgtgggggagttttatgtgggggacagagtgggggacggggacgggtagagggaggaaatagaataattctatcttaaaagggcaggtcacatctgactacatttagattttgtctaaaaactacaagagcagcctggtttgcacagatggtgtgcagtctctatcttttacctcttttgggcattttctgccaagacggagagccagctgcttgccagcgtgtgagagccaggaagaatctctgcagcagtgagggagtatagggttgtaaacctccttctcctccttctttatcatctctaacttctaacattcccacatgcttataccgtatagaacatggaagaatagcatgagtagccaacatatttcttaatacttacaataatgatagctgttaatgttgactaagtctttattctgtgttgggagctatacctagcatattacatgtgctacttacttgtcacatgaaccttacaagtgctatcattgacattcccattttccagatggcataattgaggtactgagaggataacttgccttgagatctcatagttagtaagggctgagtgtggatggaggtggtctgaggcagggctggtgggcttttccactccccaatactgtttctctgctttttctggtgccctgacattgtggatttcaggtttgcaaatccttgaagctactggggaagtgatactggtaaaatcttaagtctgtgaaggaatttgtactttgcactcaagttcacatacattttcctcatttggtgctcatggccattctctatgagaagcaggtattgttattatggtcttttgcaaaaaggagaaactgaggtcagaaggggttagtttggtgacaccagtcacagctagttgtcaaaagtctggactggggggctggatgtggtggctcgcacctgtaatcccagcactttgggaggccgaggtgggcggatcacctgaggtcaggagttcgagaccggcctggccaacatgatgaaaccctgtctctactaaaaatacaaaaattagctgggtgtggtggtgtgcgcctgtagtcccagccacttggaaggctgaggtaggagaatcacctgaacccgggaggcagaggttgcagtgagctgaggttgcaccactgcactccagcctgggcgagagtgagacactgtctcaaaaaaaaaaaaaaaaaaaaaaaaaaaagatttggactggatctgaaaccctctgcttctggtttttcttccaacctacagagcagacccagtcatctctgaacgtctgtccccaccccaagctgcgcctcattgagttgctttcagttccccaaaggaactgcatctttcctcagactgaagctaggcactttcttctgttttaagggcctatctggtactctgcttcccctttagtctggagccgagctgcctgggtttgaatttcagctccaccatttactgtgtgccttagtttcatcatctgtaacatgaagagaataacagtaacatctatcttacagggttgtggtaaggactgaatgagggattcatgcaaagtttttagaacagggcctgatatatagtattgctaaataaatattaacatttgctatcactgcttgaagcctcatattgggtgttattcccctttaagccttctctaatccttcaagtctagattagcccccatcttggatgcttctatagtacctcatcagttatgcctaaggtggcactcatcatacttgtccatgctcctgccctctgcatcaccttctctcccttccaattatattttctgtattcacctttagatctgcagtgtctagtgcaattttatttttagtctctaaacttgtggcaactttctcatcagtgtgggcagagtggtgggagaggggcctcagtcatgataggggtacaggaggtagccacagaggatgaccatatagcagtcatagagggccagaagccacgcaggaagtggacatatgctgagtactgattcaggaagagcacatgtcattcagcaaccaatggttaaggtgtcaggtttcaatgaccttctccatgaggtctgtgaggtcctctgacgtacttattgtgggtcagcttggcagccacattcatcagcccctgggacaggttcttgaatttggtgttcctctcagagaacatcccaagctttccttagaaggtggtacacaccaggctcttgtgcaagtccaaaaggtccttgtcagccattagcaccttgagttccctaatgggaactcaataaatatttagtaagtgaagtattattattttagctgatgctcatttgagaccttcaagaggcttgtttaaaaggggacctttgagtttgcagtagggttccccactggtacatatagatctttggcacaatctgtaaagacgtccctctatgtggatacactgaaaaacaaaatgcatccctctgggtggatgattttcagagctaatgtaaccccatgccagggcaccctgttgggcaagtgaagctctggctgaacttcagcccctactccctgctcagccaagggccaaactggagatttcagatgcctcatagccaactttgctttctctgaacagaacatctggttccataaatagtgtctttctagccctactttatagcaaccttgctgtctgagataatgtactctggtaatgaaataaaaacaaacactacagaagttggccctgggaaaaatcataaagtacgctatggttttttccagcaccctccctttcctcttcctggcataccttcaaaccattttgacaaatattattgtgtgtctaccatttgtaagttcccatgccacacagatccttggataaacagtttgctcacggtctagtggggaagcctaataataatagctgggaagtgctaataataatagctaacattgatcatttattatgtgccaaacattgtaatgtgtgttgtctcatgtaatctttacaaaaattccatgatattggtttctgcatcttccagctgtggaaggaggtcatttggttaaggccacacagctaataataggcagaggggaaattttgactgatgtggttaggctgcaaagtctgggatcctaatggatacgttctacctcctcaagagctgtaatgtaagtctaaacaaagtgccatgacacagtggtgcacgcttgtagttccagctactcaggaggttgaggcaggaggatagcttgggcccaggagtttgaggctgtaatgtgctatatttgcacctgtgaataaccactgcactccagcctgggcaacatgatgagactttgtctctaacaaaataaaaataaaaaataataatacaagagaaagtgccatgagaagcagaatagggagcgatggcttctggagaaacttctcaaaggataggacacttcagttggatctagaaagatgagtagaatctggtgcccatggcaagccccttcaccctcccagcagtgcttgaagatcttttctctcttttaccttaactatagtgtagatttaagagtaaaaagcccccttttttcccaagctctgagcagtcaacctacttacatgtccatcttggagatttgaaggcagaagtacagagtttatccttcactatgggtcgtgtaatcaaataagcctttacaaagcaatcagctgcacattaaatgatttccttaatcatgattgcactgcggggtaataacatacatctggtaaacagtttttataaatcattgtgattggtattgcctttacttggtcaaattgcattttgagagtgctttccctcttgtgttgtctttttggttgtttctccgctctttataactggtaatggtgctgaagggcactagtgtttaatcgcaccaactactgtccagaggtgatgggctccatctgtgtagagtgaaggtgaggcctggagtaaattacatagagtttattctttttttttttttttttttttttttttttttttgagacggagtctcgctttgtcgcccaggctggagtgcagtggcgcgatctcagctcactgcaagctccgcctcccaggttcacgccattctcctgcctcagcctcccgagtagctgggactacaggcgcctgccactacacccggctaattttttgtaatttttagtagagacggggtttcactgtgttagccaggatggtctcgatctcctgacctcatgatccgcccgtctcggcctcccagagtgctgggattacaggcgtgagccaccgcgcccagccatagagtctattcttttaagtacttcggaggaaggccaaaatcaagggcagcccctgtggtgaagaatcactaaatgtcttgatggtttggtgaagtgtgcaagagtggagtcacttgtttgtcttggtgattttggtgtgtgtgtgcatatgttctgaagcagtgcttctcaaactttagcatgagtatgtatcattagagaacttgttaaaaatgcagattctgatccaatagctctgaagtaggtctacatttctaacaagttcccaggcgatgataatgctgcccctccacagaccacactttgactggcaatgtggcagggtcatcgcatgccttagtctcagggcttattttggtactaaatgaccaagctcttcccaccctctactccctcaccaagctgccacttctagtcactggtcaggtgtcattgcaggatgatgggaagcctaattcatttattcattcagcaaatatatgccctagaacaggaaattgaggctcccaatttgccaaatcctagaaactggaatcttcagcacacaaaaactactgttacacaaaaaggccttgtgttagatttcctgcatgtctccaccttttctccatggctccaagcttccctaaacttcccttattctctgccttcaacttgagaagtactggagcagaatgtgtggctgcctgcagaatcttgtgctgggtgttggagtcccagggagctagaggtagcagggactcagggctctgagactggcaacagtgtgcctgaggcattgtctacgctctgcagaagaaaggtgggaataattctaggagcaaagcaaggaaagtgggtgcagagagaaccgatggaatttctttaggcttgaaaacttgagggggttgtgaagagaaaataagttgttggagaaaaaaatccagagtagaggttgtctaacatgtatgaaacatgctgtttttgttagatcatcaaagtgactttagagaccgacagtggcagtacatgccctgttacacaaagaggtgtttccttccataaccactgcttggtttaaaaaaatttaaaaagaagcaaaaaaaaaaaaaaaaaagaagtgtttccttttgattcataggaaggatgtaaagcattgctttatgtccgtgaggatacaagtaacatagcacatgcccattaaagaaaacatgatactatagattacagtagggaagaaaaacaatcacttgtaatattttggtgccatttcctggcagttttttttttttttttttactatgcctgggttgtttctctcatttggcattcacttgaataggaccttgaaaagttatgagatggcaccatgatcattaggctatatatgcagttttaaagcctggttttactgtagcagtgaagcacatgtattttccattttatagcgtggtctttgttagcgtaatttttatagtcacatagtttatttaacagttctcctgttattgaatattgaggatgtttccatttccaataaatgtctttgtgcaggaagttttttccatatgtaggattgcactctgaggacaggatcccagaaatagacttactagattgaaacttgttaatgttttttaaagttcttgattactgttgccaggttgcattcccaaaggttgggcccttcatgctctcaaaagcagttcctgttttgtggcatccctgacagctttggtgtttttgtttttaaataattttatcaatttttagattgttttagtttgtatttcttaattacagtaaatttgacatttttcacgatatacttcttttgtatactttttacatccttttcctgtttattataatacttatttggatttgatgtttttaatcaacttatgtgcatgctttatcatataaaagtattcaagttttcctgccatacttataatagtttttctgtatttatttatttatttatttatttttgttatgacggggtttcaccatgttgcccaggctggtctcaaactcctggactcaagtgatctgcctgcctaggcctcccaaaatgctgggattacaggtgtgagccaccacacccggcctctgatagtttttctgaatctgttcttactgtgaatagatccaacacatttttatatgtggtgtcatcgttttctaaatagtttgacatcacatttttattctctgtagcccagaatattacttctaaaagattgtaaatgatttttatttttgtttgccattataattaatttttcattttttccatgatggttagagaatatggctttataatttctgaggtttccttgtaactaagcatatgatgggtttgtgtaaatctatgaacacttgtgaagaagctgtatgtttttaggatataaaattggatatttattaatcaatccagtcttttcaattatatggtaatttatctccaaccataatattctctgatgggtagagaggagcttagtcctaccaacaccttgatttcagtccagtgaaactgatttcagccttcagacttccagaactgtaagagaataaatgtgtcttgttttaaaccactgagtttttttatggtaatttgttatagcaggcaaagaaaacgaatacggtaagtgtttaatgaaaggaagtgctggtggctttagttagttaacacacaggcttatagtggacattggttcgcacactattctaatcaccttacagatgttaattcagttctccaaccatccaaggaggttggtattatttactgttaaataactcaattgttaaagtctctcagttggtaagtgttgaagttgagattcaaatccatagttgttgatcttattatctggagacacaattcacatatcatacgattcaccaacttaaagtcgacaattcagtggttttagtatattcacaggattgtgtaccaccaccacaatcaattttggaacattttatcaccctgaaaagaaacctcatacctattaatgggcactccccatttcctccctacatggcccccaccgttctgagtcctaggaaaacaccaatctactttctgtccccacagttttgccaattctggacattcatttcatagcatatatcccattgaatgtatataccacattttattcatcagttgatgaatatttggattgtttttactttttgacattatgaataatgctgctgtgagcattcatggacaagtgttggtgtggacttgtttttaatttcttttggttatatacctaggagcaaaattgctgggtcacttgtatgtctatgtttaaccatttgatgaactgccagactgttttccaaagtagctggaccatttacatttccaccagcaatatatggtgattccaatttctccacatccttgccaacactttttattccctatcttttattatagccttcctaatgagtgtgaagtagtatctcattgaggttttgatttgtatttccctgatggctgatggttttgaaaatctattcatgtgtttagtgggcatttgtggatcttttttggaaaaatgcctgttcagatcctttgcccatttttttttttttttttttttgaggtggagttttgctcttgttgcccaggctggagtgtgatggcgtgattttggctcactgcaacctccacctcctgagttcaagcagttctcctgcctcagcctccggagtagctgggattacaggcatgtgccaccacacccggctaattttgtatttttagtagagacgggctttcaccatgttggccaggctggtctcgaactcctgacctcaggtgatccacctgcctcggcctcccaaagtgctgggattacaggcgtgagccaccacgcctggcctctttgcccattttttaaatgggtttacctttttatgattgagttgcaatgattccttatatattcccttttcagatatatgatttccaaaaattttctcccattctgtgggttgtcttttcactttcttgatagtgttgtttgcagcacaaaatttaaaagttttaaattttgatgatattcaatctatagtttctttggttcttatggttttgttgtcctatctaagaaactattgcctaatccaaagtcatgaagatatacatctatattttcttcaaagagctacatagttttagcccttgcatttaggtttttaatccactttgagttagtttttgtatatgttatgaggtaggggccaaacttcatgtttttgtgtgtgaatatctagttgttccagcaccatttgttgaaaagattattattttctccagtgaattgttttggcaccctgttgaaaatcaatttcccataagtgtgagcgtttttttctagactctcagttatattccatttctttatatatctagccctatgtcaattccacatttcttgatactacagcttggtagtaagttttgaaatcaggcagtgtgagtcctccaatttcattttattttttaaatattgtttggggtattatgggtcccattaacttccatatgaattttaagatcaggttgtcaacttctgcaaggaagccagctgagattttgataagattgcatcaactgtaaatctatttagagaatattgccatcttaaaaatattaaatcttctaatccatgaacatatgatgtctttctgtgtatgtaggtcttacttaatttccttaagtaatattttgtagttttcagagtgtaacttttgtatttcttttgttaaatttgttcctaagtatgattttctttttgatgctattataaatataattgttttaaaatttcatttttggtttgttatcatagatttactttttttgttgttgtattaatttttttattttaaaatgacttcaaaattacagaaaagttacaagaacaattcaaagagcatttcacaagtattcaccaatttaaaaaattctgccacatttatcattctctcttcccttttatatctctcccacacacaacagtcacatatagtattgttcctgaaccatttgagaataagttgtatatattatgttcctttacccctaaatatttcagtatgtatttcctaagaacaaagattttctcttatataaccacagtacagtagtcaaactcaggaaatctaacactgatagaatactttcaattgtagtccataatcaaattttgttaattggtcaaacaattgttatcatagatttacttttaacctcaattacgctcaatactatattcctcataagttcttagattctctaacagtgcttcaaataataatgacttcatgctcttaatgcaattaagattcatttaattcaatacaattgtctgttgtctatttacctctactcatattttgtatgtttttgcagttcatattttgataaaatattgaaataactctttttatctacttttttagtcctaaattctgttcccccttctcatttggctgatatattttgtccatctttatttttaatctttctaaatccaatttgattctctgttttaataaaggaatgtaaacagttcacatttattttatctgccttttctcattttattctctttagtgtttaatgtttttttctgttatgctttttgctatacagactctggactttgttatttgtttttatatttccacaaagctgtgaataacggacatcttacttttaattgtacttgtagcaatcttttttttttttttgaggcagggtcttgctctgtcacctaggctggagtgcagtagcataatcatagctcaatgtaaccttgaactcctgggctcaggtgatcctcctgcctcagccttctgagtagctagggctacaggcgtgcaccaccatacccagctgattttttattttttgtagaaacagggtcttgttatgttgcccaggctgtggaaataaaagaaaagcattccatcctggctaacatggtgaaaccccatctctactaaaaatacaaaaaaaattagccgggcgtggtggtgggcgcctatagtcccagctactcgggaggctgaggcaggagaatggtgtgaacctgggaggcagagcttcagtgagccgagatcataccactgcactccagcctgggagacagagcgagactccatctcaaaaaaaaaaaaaaaaaaagaaagaaaaaaggaaagcaaaacattcctgagcttaaatttatcttaatatcaaagtgaaattagtaatttttgaccccattatgagagaaggattaagagtttttgtgtccctgtgtcctcctttttcttattttaaatatttaatttgataatattataaattcaaatagtaaaaattatgttagtcacttatttcacaggattttttctctttatttggatattaataatcaaattcatccatccatgaatttaatgaattttaatatagttcttatctcactatgcctttccccattcttgggaccctaatcttgattcctttcataatgatctagtaagcatattaatttttagaaaggggatcagtgttataaaagagagacaacttctcttaaatatagcaatctttccccctcaagtcattggaaatattcctccattgtcttgagaagtttgatgctgtaaagaagttgctatagtttgaatatgtccccccaaaagcatatgttcaaaacttaatccccagtataacaatgttgggaggcaagacctactggaggtgcttgggtcatgagggctccaccctgatgaatggatcaatgccaataataaaaggacttgaagctgtgagtttgttctcttgctcttatgctctcttgccctttgctttctgccatgggatgacacagcaagaaggcccttgccagatgctggccccttgatctggaacttcccagcctccagaactgtgagccaaataaacttctgttgtttataaatgactcagtctgttgtagcagcacaaaacagactcagaagttgaggacaactgttttttagcctgaatggtttttgttccccatttctgaaatttacaactttcacaataagataactgggtatagacttcctttcaaaaatttttgcctgggatatggtaaaccctcttgatttccaaatttaggacttatttaggagcaagaaagatttcttctgtcacaactttgattaatgctgctgttttgtttgtttgtttttttcttcttcagggacctatttggatctcttatctctaaattgcctgcctgtggcctgcctgcctgcctccttccctctttctttctctttccctctctttcttctttctttcttttcttttttctttctttctctctctctttctttctccttccttctttattcctttcattttcttcatttatttttcattgcattctgagactattttcctaagaatttcctctatatcactgattcaattttccttaactatctcccatataaactttcattcagttacagtgtttttggcttccatgaaatcttttattttagcttgtttatggcaacatcctcttgtacagagttcaaaaaaacaaacgatttccatctattcctgcttcatatctattttagaggcaagcttttccttcattgttctttctattttcttgcaaaatttatttaatctaaggccttatccttgaaagaaaagagattccttttgtatgtatgtatggatgaatgtgtttttcaccttatcctaaaaagtatttaaggatgtattaggggagatttatcccagtctaacgttgatatggatggaatgcatagtctgcccatggctcccttaggttctgttcaggtcttggaaaaatgcaatcaccaaatgctagatccccatctaagtatgagaagacatctaaatcctccaggcagaaaagttcactcagacccaggaaagaaggcaaaagtctcgccatgtacagtagtcatgttccagaagatagagtgactagggctgtcagagttctgtcaatatggttgtccagaggcataaaggcattcaggaaggagcctttgctccttccccactgagagcaaacctctgttgaattagggagtgagctcctgttccactgcttagcagttttcctcagcctttttttggatatcatttctaagatctctttagacttgtggtagcatatggctgctagtgtggctgtttctgtgaagaacattccacgcagaggaaccaacatgtacaaagtcctgaggagaaattaagtgtttaagaaacaacaaagaatccagtgtggttggagtggagaaagcaaggaggtgagagctgagaggtaggtttggcctaaatagaatgtctagcatcctgcaggccactgtatagcctttggcttttacttatagagcaatgggaaaccactgtgagtgttgagcacaggagtgactttatccaattcacgttttaataggatcactctggctgcattgtagagaacagacataaagggatataagcagagagactagtcgggagactactgcagtaatacaggtaaaagatgatggtgtccatttccaggtagtagcagtggacacggtgaaaagtgattggatttgggatctaatagagccaataaaatctcctagttggatttagatgggaaacaagagaggaggaaacttgactccaaggttttgggccttccaagaaactagaaggatggagttgccttgagatgagaagactgtaggaggaatagttttgagtgggaagatcaggatctcggttttgggtgtgttaatgttccgatgcctatttgacatgggtctttcaaatagagcagatggatatacaaatttggagtttggggaagaagactggacttgagatacaaatttaggtcatcagatggtgtttaaactgagtgagacaggatttaaatccaatgagactgggtaagtgagtgtaactagaaaaaaaaaaaaacgacaatgctctaaggactgagccggatgctccaactttaaaggttggggataggaagagaaaccgtccaagaagattgagagagagagagagagtgagtgagtgagtgtgtgtgtgtgtgtgtgtgtgtgtgttggagtgggggaaggaggataaactaggtaggtgagtatggtgtcctgggagccatcggagaaaagtgtttcaactgggtctaactgggtctaatgctgctcatgggtaaaataagatgaaactgagaattgaccctggcatttggcacagtgaatgttgaaagttgttagtaaagatttcacaggtagaggaagtcttttagggatggaaatatttacagagaggtgtgtaacttcctggtgctgatgtccatccagactgcagacattttctgtgaaagaaaagccagaggcctttcagggccaggaagtatggtctttttcaattgtgtttttctcaaaaagcttgctctaagattcacattgtgaagacagcccaaactccaggcccctacctactgttactcttcccagaactgccttatggcttcagagagcagatctgtttgcaaaactaatggaggattagggctggggaggagtagaagatcacatttcaaatgtggtgtaggtatctatgcatttggcattttaaaaagactcagtggattttagtgctagaagagacttaaatatcctcaaatctcttaattaaaatgaaatcaattgcatttgctgttttaattacaaaaataatacaagtttataacaaaatttaaaatatataaagaataaataagaaaataaaaatttgtgtaagtttactactcataactctgtcatatgactttttagtctttctcttgttccctctctttggcttactttttattgttttttagtatttattttctacaaatttggatccatgttatgcataccaattgtaatcctcaattttactttacagtttgtcgtgacaattgaatggcttttaccatatgatcttttaatggctgcatataatattccatcatttgaacatgtaccatatgtctatttaaccatttccttttgggaaacatttgagaaacttccagttactttccaaattatttttcaaaaacatttgcaagttattttccaaatatataattatattataacttctgtggattaatctcatttcacatctttgacagtttctttaggatcaattcctaaaagtagaatttccaaatttctttccaaatttcagcagtgtatgagtgatagaaacattgaagtcctgaggtgggaaggaatgtgctcatgttgcacaactggttggtggctgagtgtgcccagttcccttgcctttttgaaagagcccctctccttttcttcctaccatgctttctatagcatttcagcctccttttagtgatgtcccgtatgactccttggaccttgatgacatttaaccttttcctgaaaactcttggctcccacttatcccaaactagtcccccagtgtatctctgggcatgaactctgaacaattagagatgtcctttttcatgagagaagatgtacacttctcagatacattttctctttaggggtacaaatgttttcccattagtcaagaactgccacccattagatattccttcatgtatccgaaggcttcctggagttttcctgacttctttttagctttactgatcatatattttctctctaaaatcttactcactgtagtacagacatactttaaagttattgcaagttttgttccagaccgctacaaaggaagtaacgtgattaaaagagtagtatgaatttttggtttcccagtgcatataaaagttatgtttacactatactgtatctattaagtgtacaatagcattatgtttaaaaaaatgcaccttaattaaaaatactttattgctaaaaaaatgctaacagtcatctgaaccttcagtgagtggtactctttttgttggtggagagtcttgccttgatgtttatgttgctgacttatcaggagttggttgctgaaggttggagtggctgtggcaatttattaaaagaagacaacaatgatgtttaccacattgaatgactcttcctttcgtgacagatttctctgtagcatgtggtgctgtttgataacattttactaacagtagaacttctttcaaaattggagtcaatcctcctccagcactcctgctgtttcattgagcaagtttacataatattctaaatcctttgctgtcatttcaacaatgttcacagtatcttccccaagagtagattccatctcaagaaaccactttctctgttcatccataagaagcaactccacagctgttcaagtttcatcatgagattgcagccattcattcacatcttcaggctccactactaattctagttctcctgctgtttccatcacttctgtagtcactttctccactgaagtcttgagcccctccaagtcattcatgagggttggagtcaacttcttccaaactcctgttaatattggtattttgacctcctcccatgaatcatgaatgttcttaatggcacctagaatggtaatttttgtccagaaggctttcaatttactttgcccaggtccaacagaaaaatcattatgtatgatagctatagccttattaaatgtatttcttaaatgagacttgaaagtcaaaattactttgttttgtgttgctataaaggaataccagagacagggaaatttataaagaaagaaagtttatttggctcacaattctgatggcttgaaagctcaagattgggcatctggcgagggtttcaggctgcttccactcttggaggaaggtgaaggggagccagagtgtgcagagatcacatggtgggagaggaagcaaagtatagagaggccggtgctagcctctttttaacaaccgctctcatgggaacgaatagagtaagagttcactcacccccaaagaaggtcattgatctatgcatgagggatctgcccccatgaccaaacacctcccatttggccccacctctaacactggggataaaatttcagtatgaggcttggaggagacaaatatccaaaccgtagcactccttgatccatagactgcagaatggatgttgtattagcaggcatgaaaacatttatcttcttgtatatcttcatcagagctcttggatgactaggtgcattgtcaatggacagtaatattttggaaggaattttttttttctgagaagcagacatcaacagtgggcttaaaatattcagtaaaccttactgtaaacagatttatggtcatccagccttttttgttccatttatagagcacaggcagagcagatttaacataattcttaaaggccctaggattttcagaatggtcaattaataatggcttaaacttaaagtcactagcttcattatcctttaacaagagagtcatcctgtcctttgaagctttgaagccatccttttttatggctgcatagtattccgtggtgtatatgtgccacattttcttaatccggtctatcactgatgaacatttgggttggttccaagtctttgctattgtgaatagtgctgcaataaacatacatgtgcatgtgtctttacagtagcatgatttataatcctttgggtagatacccagtaatgggattgctgggtcaaatggtatttctagttctaggtccttgaggagttgccacactgtcttccacaatggttgaactagtttacactcccaccaacagtgtaaaagcgttcctatttctccacatcctctccagcgtctgttgtttcctgactttttaatgattgccattctaactggtgtgagatggtatctcattgtggttttgatttgcatttctctgatgaccagtgatgatgagcattttttaatgtgtctgttggctgcatagatgtcttcttttgagaagtgtctgttcatatcctttgcccacttttcgatggagttgtttttttcttgtaaatttgtttaagttctttgtagattctggatattagccctttgtcaaataggtagattgcaaaaattttctcccattctgtaggttgtctgttcactctgatggtagtttctttagctgtgcagaagctctttagtttaattagatcccatttgtctattttggcttttgttgccattgcttttggtgttttagtcatgaagtctttgcccatacctatgtcctgaatggcattgcctaggttttcttctagggttttcctggttttaggtctaacatttaagtctttaatccttcttgaattaatttttgtataaggtgtaaggaagggatccagtttcagctttctacatatgcctagccagttttcccaggaccatttattaaatagggaatcatttccccatttcttgtttttatcaggtttgtcaaagatcagatggttgtagatgtgtggtgttatttctgaggcctctgttgtgttccactggtctatctctctgttttggtaccagtaccatgctgttttggttactgtagccttgtagtatagtttgaagtcaggtagtgtgatgcttccagctttgttctttttgcttaggattgtcttggcaatgtgggctcttttttggttccataggaactttaaagtagttttttccaattctgtgaagaaagtcattggtagcttgatggagatggcattgaatctacaaattaccttgggcagtatggccattttcatgatattgattcttcctatccatgagcatggaatgttcttccatttgtttgtgtccttttttatttcgttgagcagtggtttgtagttctcctttaaggggtcctttacatcccttgtgagttggattcctaggtattttattctctttgaagcaattctgaatgggagttcactcatcatttggctttctgtttgttattggtgtataagaatgcttgtgattttcgcatattaattttgtatcctgagactttgctgaagttgcttatcagcttaaggagattttgggctgagacaatggggttttctaaatatacaatcaggtcatctgcaaacagggacaatttgacttcctcttttcctaattgaataccctttatttctttctcttgcctgattgccctggccagaacttccaacactatgttgaataggagtggtgagagagagggcatctctgtcttgtgccagttttcaaagggaatgcttccagtttttgcccattcagtatgatattggctgtgggtttgtcataaatagctcttattattttgagatatgttccatcaatacctagtttattgagaatttttagcatgaagggctgttgaattttgtcaaagaccttttctgcctctattgagataatcatgtggtttttgtctttggtatattctgttgatttgggtggagagttctgtagatgtctattaggtttgcttggtgcagagctgagttcaagtactggatatccttgttaaccttctgtctcattgatctgtctaatattgacagtggggtgttaaaatctcccattattattgtgtgggagtctaagtctctttgtaggtctctaaggactcgctttatgaatctgggtgctcctgtattgggtgcatatatatttaggatagttagctcttcttgttgaattgatccctttaccattatgtaatggccttctttgtctcttttgatctttgttggtttaaagtctgttttatcagagactaggattgcaacccctacttttttttgctttccatttgcttgttagatcttcctccatccatttattttgagcctatgtgcgttccttgcacatgagatgggtctcctgaatacagcagactgatgggtcttgactatatccaatttgccagtctgtgtcttttaattggagcatttagcccatttacatttaaggttcatattgttatgtgtgaatttgatcctgtcattatgatgttagctggttattttacccattagtttatgcagtttcttcctagcatcgacagtctttacgatttggcatgtttttgcagtggttgctaccggttgttcctttccatgtttagtgcttccttcaggagctcttgtaaggcaggcctggtggtgacaaaatctctcagcatttgcttgtctgtaaaggattttatttctccttcacttatgaagcttagtttggctggatatgaaattatgggttgaaaattcttttctttaagaatgttgaatattggcccccactctcttctggcttgtagagtttctgccgagagatccactgtgagtctgatgggcttccctttgtgggtaacccgacctttctctctggttgcccttaacattttttccttcaccttggtgaatctgacaattatgtgtcttggggttgctcttctcaaggagtatctttatggtgttctctgtgtttccggaatttgaatattggcctgccttgctaggttgaggaagttctcgtggataacatcctgaagagtgttttccaacttggtcctattctccccatcacttttaggtacaccaatcaaatgtagatttggtcttttcacatagtcccatatttcttggaggctttgttcatttctttttactcttttttctctaaatttctcttctcacttcatttcattcatttgatcttccatcactgataccctttcttccatttgatcgaattggctaatgaagcttgtgcatgggtcacatagttctcatgccatggttttcagcttggtcatttaaggtgttctctacactgtttattctagttagccatttatctaatcgtttttcaaggtttttagcttccttgcgatgggttcgaacatcctcctttagcttggaggaatttgtcattaccaaccttctgaagcctacttctgtcagctcgtcaaagtcattctccatccagctttgtttctttgctggcgaggagctgtgatcctttggaggaaaagaggccctctggtttttagaattttctgcttttctgctctggtttctccccatctttgtggttttaatctacctttggtctttgatgttggtgacctacagatggggttttagtgtggatgtcctttttgttgatgttgatgctattcctttctgtttgttagttttccttctaacagtcaggtcccttaactgcaggtctgttggagtttgctggaggtccactccagaccctgtttttctgggtatcaccagcagaggctgcagaacagcaaatattgcagaacagcaaatattgctgcctgatccttcctctggaagcttcgtcctagaggggtgcccgcctgtatgaagagtcagctggcccctactgggaggtgtctcccagttaggctacatgggggtcagagacccacttgagtaggcagtctgtctgttctctgagctcaaacaccatgctgggagaaccactgctctcttcagagctgttagacagggacgtttacatctgcagaagttgtctgctgccttttgttcagctatgccctgcccccagaggtggagactacagaggcagtaggccttgctgagctgcggtgggctctgcccagttcgatcttccaggacactttgtttacctactcaaacctcggcaatggcggatgcccctccgcctgcctcgcaggttgatctcagactgctgcactagaagtgagcaaggctttgtgggcatgggatccgctgaaccatgtgtgggatataatctcctggtgtgccatttgctgaaactgttggaaaagcacagtattagggcaggagtgtcctgtttttccaggtaccatctgtcatggcttcccttggctaggaaagggaaatcccctgatcccttgcgctttccaggtgaggtgatgtcccgccctgcttcagctcgtcctccatgggctgcacccactgtccaaccagtcccaatgagatgaaccaggtacctcagttggaaatgcaaaaatcacctgtcttctttgtcagtcatgctgggagctgcagactggagctgttcccattcagccatcttggaaccaagatgtttctaatgacagacagggaaaagaaaactgacaagacccaggcagttgacttgactcttgttagagctcaacaggtggtttgtagttgaggaagtgtcaatggctaaaagatatgagaaaatatccaacttcactggtaggcaaacaaagtaaactaaaacagtgaggtactatttttcacatacctaaaagatttttttcttaatatccagtgttgttgaaaatgtggggaaactaatattccctaactgttggctagaatgcaatggataaaatttgacattttgctctactttttaggatatgtcctcaaccttatcttttaacctttttgttaaaatttcttattttggttattactgtttaaatttctaaaatcttgtttttattttctgatagtttatttaaataaaattgtacacttttttggtatcatggatgcaatattttctcctctctctgatgatagtaattaatgttttcttctttgtttcctctgtttttttaactgtgtttttaacttttcatttatgtctttcatgttgaagaccttttcacatattatcttacttaatcttcactcagttctatcaggttaatattattatccttgttttatagttaatgagtcttagagagtgtatcattgttttatttctcttaccatgggcagctgaaaaaattgttggtcatagaccaaaagtactggtcacagaccagccaaatccacagtccagcttcttaatctagctggattctctgttgaatccttaaaatctctcctcaccacctccctaaccccaacacttgtctcattatattagacaactttgttagaattttttccaagttgaattaaagtctttctccttccctttacctttccactgtcattagaactagttctgccctgtagaccatagagatcctctcccatttctacatctccttccataggagatagtccctcaaatatttgaaatgatactgtcatgattcctccacatctgccattccccagcctgaagaggcctggttctgcctactttattctgcacctttgtgaaattctgcttggctaacatttttggaacgctttggaccatgttctctcaaagtctcactttaagggtgtgtctataacttaacatagggtccagatatgctctgaaagacttaacctcaaatgggatactgtcattttattaatgtatgctggagttggcttagtttcaatttgaggaatttcatgtgctgcaacttcttttcctagaaagtaatacttttgatgtttctcacaaattataatttctaggactctgagctgcctacttctacttactcctttttagttagggttgtgtgtgtgtgttgtccttactggttactgcttttacctcctagggtctttttttcaaggccattttcacttaaccttagctattaagcccaagtggaggtgctaaggtgatttgaaaaatggaaatatcttaatttaaattgcacaaacaaacactatcgtgcatatttgagaagtaaaatacaatgtaaatgggggcttttcaggcaccatgttaagcacttggtatatattatttcatttggcttttataacagcattatgaggtgagaactgctgttattctcaatttagatgtgaggaggtgtggctagttcgatacaactaggagggccagaggtgtattgcagacctaaacataccagactcaagactaatactgctgttacccacagaaatgaagctcacatattgtattttatgccaattatagctgatgttgttggaaggaattatataatctgctgaggtgtattgcatacttctcatctttaacagaacataccaaacataaaaacttttatttgataggttgaggtgatgatattgaacatctgtcctcccatgttcattgtagcactattcacaatagctaagatttggaagcaacctaagtgtccgtcaaacattaatttttgtggccctttaagtaagaataaatatgtggccctataaatatgaatcttatgtatatttgtatagacagtgccaagcatattgtaggcaactatgattcaaatcactgcacacatgcgtattgaatgagtacatgaatgaatcaatgaagttataaaacagcaatgacctcaaggtctattaaagtttttagaactatttgccactacactaaatcttttataaactgttttgctttatgagtctatgtgtctgctttttgtaatttttttcccttctccctgtcattgtaaatagaatatctatggacatgaaatgtgcctgaagttctttgcaaatggaagactaaaaggaagttgccccaggcaattcagatcattgtgtccaagagaggaacaaactcatgtttgatccaggtcatgactgtattcaagggctttgatcctaggtgtggggtccagctgtaggggcatcagggaagtacattcttggtctgtgtccaagtccttggtcagggaagtctgtcttagcaccatggagacaggggaaactgaattcagaccttatgtgacaggagtggactaaaaccagtgcatgcatatgatccagcaattccatggctaggtatacacccaaaagaaagaaaatctgtatatagaagagatatctgccctcccatgttcgttgcagcattattcacaatagctaagatttggaagcaacctaagtgtccatcgacagatgaatggataaaatgtggtacatatacacaatggactgctattcagccataaacataataaaatcctgttatttgcaataacatggatagaactggaagtcattatgttaagtgaaataagtcaggcacagaaagacaaacttcacttgttctcactgatttgtgggagctaaaaattaaaataattgaactgagagagagtagaaggatggttactagaggctgggaagggtagtgggggctgggtagaatggaaaaagggatgggtagtgagtacaaaaaatagttagaaagaatgaataagacctagtatttgatagcgcaacagggtgctatcaaacctattgccttggtttgcaatagggtgactatagacaataataatttaattgaacatttaaaaataactaaaagagtataattggattgtaacacaaaagataaatgcttgaggtgatggatacctcatttatcctgatgtgattattacgcattgcatgcctgtaacaaaatatctcaagtaccccataaatatagatacctactgtgtacccataaaaattaaaaataaaaaaataaaaataaaatcagcatagggagccagtctcctactaatttggtcaacagtttatgtcaggttgtagtcttaagggtggaaacgaaaagagggccaggaccttggtagccagaccaaagttcacgactgtgttatatactctgaaatggatttagccaaggaggtttgcccagattctcccataggtgatgttaaattccttccaggacacttgaccccaggcatgggattgatggtgggttttcaggtgctctcccactaaagcaaaaatgtccataatatattccaggaattaggtgagacagagcctcaggaaacaagcctgttatgccttcaccaaggcagggcagagctggataagggtgaacagaaagggacaaattattgatgagagttctgtgagtagaaactcctttctcttctttagaatttctgcctccagtttgttaatgccacttccaaaatacactgctctgagctgaagataatactgcatgcagatagagtgccatgaaggcattggtttgcagtgatctataaaggactaatgtgccaggctctgtgttaagtgcttgactttcaccaccttgtttacccctacaacaacaatttttaaattgccctattaagatatagagcattctatcattctaaaatgtttcctgtgattcagtatatatttatttactttttggttgatttattgagtgaagaactgaaaatcactttatgggtagtatatttccttttttgtatcacatctgaagtgagacattgtcaaactgggtaggtatgtccagaatgaggaaggatgcagagactatgtcatataaggaacatgtgtcaaaggaggtagtaaaaatgaatatgactggggctagtagttccaagaaaaaattggaaacatgctcctggctaatcagaaggtttagctaaaatattttcagagcctatcacgtgaacctggtaaaaacaacccagtattgggcaaaagagttagggcaatttgaggaagtcctggcgcctaggctaggtggtgatgaacagggaagatgtgaaggaaaaaggaagagagaattttcccccttgccttattgatttcatcctgcattagttcatctcagctcttcctgttgttcccccaaccccaacagtttttctattcttttatctatttttgaattgattctctaaaagttctaaggctgcgttttcagctcctggtcatctggataactactggtttcaggattcttggggataatgggatggaggcatgggaggagaatgtctgggttaaaaagatactgagctagaagtagaaggcttggttgaattttacactcagcaacatacaggttgggcaagttgctttgctctttagcttcagcttttgcacacctataaaatggaagcggtgtgtgtgtgtgtttgtgtgtgtgtgtgtagtgtatgtatccgttgtctcctagggagtttctttgaggatcaaaaaagagagtggacaaaaatgaattttgtaaactgtttttgagagcatctaaatgtagttttatgagtagcattgttaccattgtcgctgttctatttgctgaatcttgtttaatttggaagctccctaattcacagtgatttgtatagtggggtcatcactctgtaggagctctaaatggagactttgtccatgatttccaaaaggtcatccaccccagagtcacatgagactggaaagcaaatctttttcattaattggcttcaagtactttcagcttcaaatggaggtctctaagggtccttggctggcacatcaagggggcatttcaaagaaagtggcaaaatcttgactaaacttcagagcaaacacgcactcttttctttgctactctctttctaaaaagaaaaacaaattatactggtctgggttgtgtgagcatgtgtgtatcagcttgttctaattctcttttcccaaccccttctttgcttgtcccattttcaagataggataacacccaggtttttatattaccttctgtgttaggactttcttaggattcctaaaaattttggctaagtagcattaggcctgctctatttcacaggtaggcataaaaaaaaaaaaaacagtgtccacttcttcaagacagtatccaattcttcctggcattttgatggtaggaaaaatatttgaatttatttttagggcaagtcacgtggcaaaaagaataacaagtatttatggttgcctggggaactcagcttctagttactactgattatgggaaagaggaacaaattttaagatgaggcaaaattggtgaccaagaactagaatagcaggtggcctgggaagaggtgggggtgaaagcgggtagaaaatctatgcaaaaatataggttcctagtcattttttttcttttgtctctttcgattactatatcctgccttcctgcaggaggaatgtagtaagatgctttgtataatcaggtgctttgcttgttcttttttttttttttttgattgtagaaaagatcagtgtagcaatttgaccatttgccaaattacccataagatagggtaggcattaaaaacccagggacactgaagtcaggaaatccagcttcttgtatcctggatctttcttggaacagcctgtcacatatgacatctaatgatgtagcaccagctgctcacaaatacaagttccttagagtatatagacattatggggccactaaaaatgtcttatatggcttgctgccagcattttcagcactgtctctcaccagcagccactctctaactgtttgccctagccaagctcagagacatggggactcctatgagctccattgtcttgtgtagagaatggggctaactgtagagtgtgaaggcctggggagaaaaactcaggctgtgtttcctagtcaccccaagaccttgtggacccaggaagtagcagttccagagaccaattgctatatggctttctgcatgcccactgcctttgtcttgctgttgtcgcaggaaacatctggtgtacatccagtgcacccagagccttttggaaaacacctatcggcctcagtactcttttccctcaggctggcagacaatgaggaaggaggagagagagctacccattggaggaggaagtaaagctggaggctggggtagtggcaagatatgagcattcaggtctacaaagcttcaagtctctcattacttcactccatcaggccaggacaatcatgggggtttggcaggagtggcgttgcagggagtttaggcctaagggagtgtatgtgtgaggcacaaagtaataaggactggactttgttacctgaggtgatgagggtgacaggcccacatggataaattaggaaacaggcaacaggttctatagctgcatatcagagactcacagagtggaaatcactttgatgagggcagagcagcagcccaaatgaccggatacccactgtggaagtcatcccctcatcactttttcattcccaagactcagctcttctctgactctgttactttgttggcaactcccgttgcagtgtctgggcaatttctctcagttgttacaacttgcattcaagggcatctcttgttccaggccaactctattgatctctgaaaaaatgggaggtagaacagtgttcaagcattcagataaacctaccttccaatcatagttctgcttcttactagctgtcccaccttaggcaggtaagttaacttatctgaatgtcagttttcccgcttgtaaaatgcagttggtattagtacttaatttaaagctttgttatgaggattaaatgagataatgcaagtccagcctatagttgactttggcttaagcagcagttgttggaacaatctgttgtggccaagatcataaggtctcaggacacaaggttggccacaaaaccaacccagcaacttatgaagcagaaaccatctgtggtaacttttctcagaaggtggctatgtaaactggcctcatttggctgaaggaagttgggaggtggataggtgggggaaataaaagaaaagagaagagttaaatgagtgtcaatgtctcctaataattaagagcttagaatccctggagtcagacaggcttgtcctcaaattccagctctgtgcttaccatttgtgtgaccacgaatatgttatcaaacttttggaccccagttttctcaagtgcaaaataggctaatgatatctatggtgttgtgataatttgatgaacaatgagtataaagtgcttagcacagtgcctgctacccagtaagaacataacaaatggggaagaggatgattgtgaggatggcaagcgtttttcttggcctagcatccagtggtgctgctcttgttatctaaggaggcaggaaggagacaagagtgggcacttggtaaaactggatgcaggtgaaagagaggtgtttatctgagggcctcatatctgagcctcacttctacctcctgaccccttatgtcctcccaccctgctacccagtgcttgggtgctgcttaaagcactttgttccaaactccctagggatggtttgcccctccccttcccataatgactcaaaacttctgttcattctgttcagctttgccacagccaggttttggtgagaaggaccacacagcttcctttgactttaaggccaccagaggtatttctttttaactccaccaaattggaaattagtggagcaataagcaatggaggatggagggtactttgagcacagagacttccatattgccctgaaaaggagcctgaaagacaaggttgaaggagacgcaggttcagtaggggagggagaaggaatgcatatccctagcttccgtattgcactaccgtcctttgcctgagaaagcgaaccctggtgttagaatctgagactaatgttgttccccaaggaggaaggcagctcaggactggttcccaccaagccaagtgcagtcctagattctggctccctgtgcccactgtcagcagagaaagcaccaaatctagtgagaaaaagtttcagcatatcttaaaatgacagaaaccaccttatccaacctagacttttctgccatgggaaaaagatgaaacctggaaatctgggaaacttaaaattttcaacaccatttataaatataaaaagcctctggttacttgagtgttgcacatttagatatttgattttgtatgttgattacaaatggagttgtggccttgcaaaccatcacaatcatcattataatcattgaatttatggttcatatggcagtttcttatacattattcaatttactttaatcctcttaactctgtcaagtaggtattaccattaatcctcattttacagctgaggaaacaaggtagaaaaggtgacttactcaagatcccagagctagtaacctcgaggttttgttttgctctttggttttgttttcaatttaggtaatgagctaccaacattagaatgatgcatagaaaggtgctgggccatggtctttgcatcttccaataaagcataataagatatattaatttccaggaaaagagttgagggagaaaaaagggggaatatgatttattgatacaacttttagggaaatttgatcagcgtagtattccaagctttattttgatcattttcaaaccaaagtttaatctgttaaaatagacatgcttcttttactctgtgtaaacatgaagctccacatattacaagagggcttggaaggatgggcctactaattggtacagagcaacaaagtctattttttatttaaagatataggtgttttaggaaggagaggggatgttaaagatagtatttggctgtatgaaaatatagaagtatgagactggcagctctgtagagggctttgggtgagagaatacaaaggagagaaaatgagaaagacattgttgtatgaatataagataaaccaccccagttaagtgcaggctctggatgaagtatttctattacaaatgacagagctgggacagaagcaatgtagactgttgatgcagtatctcgaggggagtttgcacactggatatgtaaattattattgtttaaagatattcttccatcttggggaagttgcttaacctatattatttgcatttttcttatttgcaaaatgggactaaaacagtacagttcttaccatatgtaatctttgagagtattaacaaaaaaaagtatgtgaagtgcctactacagtgcttgtcataaagaaggctgcagtggatatggcaacactttcctccatcaacccccacccccaaattcctttcagttatgaaaattctgaaacactgtaactttacctatatatttattggatatctacttttcgaaaagtagaacatgtgaagaattcttgatttttccttggagatacctttgcaagttagaggaagatattagtgcctgtcttccttggtttaattttaattcaaaagaaagatatgattgagaaggtaggagaaatgactgactagttcatctaggcattaatagtcctaaaagagggaactgtaaggcaaccagacacatggcctcaattttttaagaaggcagatttaaaaataaatacatgcataaataaaattttaaaacaaaaccagaaaaaatggtagacgaattctcatgatcaaatttactaaaaagaatatggctttaaaagatgagtctaggccaggcatagtggctcacgcctgtaatcccagcactttgggaggctgagttggggaatcatttgaggtcaggagttcgagaccagcctggccaacatggtgaaaccccatctctactaaaaatacaaacattagctgggcgtggtggtgggtgcctgtaatcccagatacgttggaggctgaggcaggagaatcacttgaacatgggaggtggaggttgcagtgagctgagattgcaccactgcactgcagcctgggcgacaaagtgagactctgtccaaaaaaaaagaaaaaaaagaaaaaagcgagtctaaaaaagaaataactaaatgagaaacctgattatacaataataaataatcataatggatgagaaaagcgaaaagcagttaaaacacttatttgatctgaggaactttacgaggaggcgagaaagtatgggtgagtttaattttcttatatattattttctctattttctaaaaatctctatggtaactatggcttttataaaataaacagttttcccccgaggatttgtacaatagagaaatggatgcaagtaattgagaagaatggttagaagctaggagaattcttttaaaagtagcatcacttggactaaatatctgttggcgatgaggcatggaggaaaaaatgctaaagataacaaaagttattttggttacagttcagtggaagaacatgaacaggaagaggaatgcatagtgatcatggatgatgcaaaggaattggaacctctgaacttctattttgcttccatctagaaaaatggagttcaatcagtacaaagtaaaacatacacaattaagaagtaattgaaatggatgagaatttattgagagcccttgacttttctaaatgagtttaaagaattttagagagatatgctctttaaattattggaattggtaatctaaatagtaaaagatgaaagagaatggatccaggaaactcagtatgagttgatacgtggcaaagtcttaaatatggaagatttgttaacacctaaaaaagaaagctccagtcacttgaaactggcatgcatttattgaatcaacttatatcaaattactcttatttgtaaaatatttagaagggctctagggttaaaaaattttggcagtctctcaaattcatagaaacagtgtacatttgacccttgcacaacacaggtttgaattatatgggtccactttgcaacaattggaaaaactcaaagatgaaccatatagcctagaaatactgaaaaaaattaggtaaaaggtatgtcatgaatgcataaaatatatgtagatattaatctatcattactaccatgaaatatacacaaatctattataaaaagttaacatttatcaaagcttacacaattacagaccatgcatgacaccacttacagttgatagaaatttaaacaaatataaagatgcagtattaagtcataactgcataaaattaactgcattacatactatactactgtaataattttgtagccacctcctcttgctattacagtgagctcaggtgttgcatgtatctgcctagaatgccataaattgcatattgcagtaaaaagtgatctctaatggttctcaagtattttgagtatttttcattgtgtttagtacaacactgtaaactttgaataacaacatgggacccattcaaagtaccacgagtgatattggaagtgctctcaagaagcagagaaaagtcatgactcatgacattacaagaaaaagttgaattgcttcatatgaactgtaggttgatgtctgcagcggtggttgcccaccacttcagatagatgattcatctcatagatggggatcttgcaaacttaccatatcgataaatacagtacagggttataaatgtattttcacttctttttgattttcttaataacattttcttttatgtagcttactttattgtaagaatacaccatataatacatgtaaaatagaaaatatgtgtaaattgactatgtgtgttattggtcaacagactattagttaagtttttggggagtcaaaagttacatgcagattttcaactccgtggaggtcagtacccccaacttccatgttgttcaagggctaactgaagtttatttcatcaagagtttaaaatgttttttagttgtagaaaatttcaaacaaatacaagatgaagagagtaatataataaaccactgtatacttattacccatcattacaaactatcaatattctgagttttttttgtttcatctatcactttcctcccaaccatacctttttgctgtttttggaatattttaagcaaatctcaaatattatatcattttacttgtaagtacttcagtatgaaaaaaatgtatagcagagtctttcatgatatgcccaaagatgagttggagaaatagagattggataagaatgaactaaaaggattggtactaacataaaccatggccaaatcatgttgataaatagtttgaaatctaccttgaagaaaggtggtagggaaatatactacaagattctgtccttgttgttgtcttatgtggcacgatttatcaatgatatggccaaaaatttagaaagcatgcttagcagatttgctaacaatacgtagcttttagtgagactgcaatgtattacataaaaggatcaagtatcatcaggctggaaaaatgagctgaaaccataggttgacatttaattgatacacacaaggtgagattcctgacttggaggtagttcatgggaagatctgtaggttttactagacccgtagccctcagtatgagtatctaaaatgatgagtcatatttaaacagtgttaatgtttagtttccaggtgaagggctataataacttcactgtatctgctatattcagttcagagcaatgtattttgagaaggacattacaaactgaagggcatctagtggagggtaattagggtgacataaaatctgaaaatcgtgatatgtaaagaatggtaaatggaactggagctatttagcctggagaataggggacttgaggatggggtttatatactggcaacccatgaggacttgaaaaacaaatttttaatgaagtaaacaaattctaatttgctttgtagcttcgagctgggatcagagagtggaagttagaatgaaacagaacttaggtcaagatagattgctaacagttagacatgtctggcaatggcttagactacctggatatgcacttctgtcccatcagtggagaattttactgcagagggtaaatacccatcttttaaacaggattaccacttggaaggagttggactaagttagaggttcacaagggagaactttggctgtacattagaatcacccggctgggggtagaggtgttaaaagtgaacagtgcctgggccccatgctagaaattctgatgtaattgtcccaggtgagactacagaaagtccccagggaactctggagtgtgtgaactctaaggatcctttcaactttgagatttttttttggtttgaaaaagagaaatcatgttcatggggggtattttagaagtcagcatggtggaaaacctgaagatgacagtgaagtcaggcacaaaactgaactcaggggagtaaagagaattgcttaagagagactaaaagtgccagagtttaccaggagacagagaagcttagaggagagggtgccttgcatagttaaaaaaaaacatcaaaagaagtgagagtgggaatggtattaggagaagagagcgtggctgaagaagatgggagtgtccatcagacaacccaccctgctttgcctgggactgagaggtttcttgggatacagcactttcagtgttaaaaccaggacaatcccaggcaaactgggatggttggtcacccgagtgccccataagaccctgtcaaaagacaaaattacaacaaatttagtttaaagatctcaataggctttattgcaattttagaattaggcaacacttcattccataaaacagagtaagtgttccaatgagttgaccagaggcagcaggctttctagacagagaaagggctgaagaaagcagaaacaaagaacaaaaagtagattggacatttcaaagttactttcattgtgggcatagggagatagaaagatggaaagataactgattggttaacatcgggttactctgttgtaagaattaaaacagagggaactgcatgattgccagttgaagactgaaactggcctgttgggaaattaggctgttgcctctctctcctgatttcatggaagaccagataacaaactcaaggtttggagaagcagaaccttagataagggactctattttggtttttaggctggtctgttggggcctagtgcaggggtttagtccaaaacagtggcctcctataatttttgttgaacacccataaatgaaggcagcacgggaaagcatttgttatcctagtcactcttcctgcagagtaaagatgtgctctgcattcatctgaattcatggctttggtgtgcgtaactgcaaaagctgaaatgtcatgttcactctggccacgtattccactcatagtaccatacttgtgtgtccagcatcttgccagggtgctggtcttgggcttactatgctttctttggggtgccttgggattccttacgtcattgcttcctcccaacaccagctgaaacctcctgaagtgattttgaagcttgtttctttgaatagcttcttagcaatttcctcactgctatttcagttcccctcccaccattgtgtgaaacagtgccaaagaatttcattaaactggctgacttcaaggatggtgaactaggactgcttctaaaaagcaggctgatagtaactgagggaattgcctaataaggaatagacgggaggcatgctgcccctacataatctcttccttataaagagagaagtatggatgggatatgttgagttgtttataaaaaataatgaagggaaaatccccctaaaattatggggaaaaggcccctggttgggctttaagtatagagaataacttgggtagtcttcacccactgtatccctaaaaggcctcacaattgctcttcagtctctttctccccttctcatccgccattaattaggaggttacttatgtgtgttatgaattaaagcagtggttctcaaagtgtagtccctggacctgcagcagagcatcacctagcaacttgttagaaatgcatatgccctggcctcacctcagacttactgaatcagaaactctgaggatggggtcaagcagttgtaataagccttccaggtgattctgatgcaggtttatggttaagaattggattagagaaactatgtttttagaaggttctttaaaggagaagtccagggcctaccctctgacatggggctgaacaggaaagcagcaagcagaagaaaccagaactaaccactgagccacggtgggtggtggtttgacatttatgtgacaagacagttaatgtgacaggaaagaaaaatgaacagagaattgtgaaatcaaataggatcagaatgatgtcacagtggtcaatccaattaattcatatcattacaaaattagaaagtcactaatgactaatttctaatatatatctgcataaaagggcattgtatgatatgaattggatttttaagtatacagtattttgtttcattttggagacatagcttttagtaaaaacatgtccaataggttctagtcaatccttaattgaagctctatgttgacaggaaaatagaaactcattgaattttaaaaagatgatttggctactacagttttattattattattttttagagttctgtagcaaagaatcacagaggccaaaaatgtgaaaaaaaaagtcatatggcttaatgatctttgtaatcataaccctatcaaccataacaaaaacaacaatcataagtacagttgccatttatcgagtgcctactctgtgcagacactgctgagtgctcagcacgggggatgaagtcatggataagcagcagacatggtccttgccctcctacccagtgattcccaaccctggctgcacttggcaccagggagccattaaaaaatgtcagtgccaggaccccagcccccgagggattctgatttaattgctttgagatgggaccccagagttggcatttttacaaaggtctccagtgaacctaatgtatatatccggaattgaggactgctctggtgaaagacttacatatgtaaacaattcattataatagccttaagtgctatgaagaaaaagctcagagtgttgtgaagggtaccagttagtgtggggttcagggtagggttttctgaggcatccttgaggaagtgactttctgttgggatctgaagggtaaataggaaatagctaagcaaagaggatgggaagggaatgttctaggcagagtacataaattgtgctagggctctgggcgaggacagcatagtgaaatgggggctgaaagggggcaaacagtgaaggaaatactgtgattagagaagtggagacccagggaggggccagaacatacaggacatacgggctagataaaggattgtgttctttcttgtaagtaatgggaagctgtggagtattctaagtaactagtggatgatgtgattatatagaccctttgagaagattactctggccgtagttggaaagcagattgatgataggtaagagtggatgcagaggaatcagttaggagtcttctgtgggagggcatgatgatgggactaagaagacattagagtgatggagagggttacatggcattgaatttttgggagattccaagacttggtacaaggcctcagggacatttgctgagttagtgagttgcttggatataaagggtgagggtggggaaggaatacaggatgatgctgctgttcttggtgtcagtaactggatgagtggtgatgttcactgagctgtgaatattgagttatagaaagctacaggagaaacagttttgcagaggaaaggagagcatgaattctgtttgggcacaataggtttaaggtgcctgtgagatatccaagttaaaaggtgaaggaggcagctgaaagttcaataatacatatgtctggaccaaatatatagtatttcccacgtatggacagtaactaagaccatggggtccggtgagatcactctaatcattttttcatacagagctcactgcgtcttcatgtcaacttacctaaataagttacgtctttaaaattttatctagaacatgaaaatttagacaggttaaataacttccccaggtcatgcagctagtaagaggcagggttgagatcccatttcataggagatgcatcagtacctagtcatactgcatttccttaatcagaatgactgattctcagatacaatggagagttaaccatgtttgctaaggaacgaccaatgaccagctgagtgtatattttcttccattataaacatggcatttgagtctactattcttggaaagtcagtgaaaaaatatcccatggagtttatgattaagctctgagatccagattttgggtttactgcccaaacatctgtccccttgcttcctagaaaacatggaaactgaagttgaggttgcctggaagcttactaaaaatagtgagaaccatggaattgagaagttaaaacatgtttgaagtagtcaaatatatacctccacttttttgatggaaaacgttgtgtactaaaagtctaaatccatttcactcattcaactgacatatgtaacactgctataggccaaaccctttgctgggctctggagaggcactccttgttcttaaggtgctctgtctcataggggagactgacacaagttaaaggctattatagcattgtgagaagggtgctatgagaggattgcaaaggagggtatttcgtccatcattagagaaggggaaagcctttctcagaaagacttcctggaagtgataacacataaactaacaatttgagcctcaatttcttcataaggtagagttagttagataaataagagaggaaagaatactgtttcaggtacaagaaagaaacaggaacattttactataaggcaggaggataggaaaaaaagaccccatttagagaccaacaccttaatacacatgggttgtgtggttagatggttagcatggccttaaaattgttgctggagtttggcttttgagggacataaaggcataactgaagaacttcatactagttagggccacatactgaggtttgcatttttaggatgactatgttagcttttaagtagatgatgtgttggaaggggaagtacctagaggtggggaggactctacagaagttattgtaggagtccagggaagaaatacagagagaaatggcctgggcatggtggctcatactggtaatcccaattatttgggaggctatggaaggagggtcacttgaggccaggagtttgagaccagcctgggcaacatattgagaccctgtctctacaaaaaaattagccaggtgcggtggtgcacgcccgtagtccctagctactcaggaggctgagacaggagaatcacttgagtccaggagttcaaggctgtagtgagctataattatgccactgcactccagcctgggttacagagcaagactctatctgaaaaaaacacaaaaacaaaataaggagataaacaaatagatttgagaggtatttagtgggtggaatcaacaaaacttggagattagagggagaagtgggaatatagggggacttagagggaaagtggtgatctttacttagccaattatgcgaaaagattaatttagagtgggtaaaaagttaaattttagacatggtgagtttggccatagaacatccaagcagatatgtccagtaggtgactagcattataaattttgagctcaagagaaaggcctgggctggaaatacagatcagggaatcacggccataaagactggggacttgtcatcatagagattaggaagttatcctcatagagactagggcattgtgttagtctgtttgcattctttaaaggaatgcctgagactgggtaatttataaagaaaagaggtttatttgtcttatggtcctgcaggttcagcctgtaacatggtgcttgtacacaagcagtatagtgccaacatctgcttctggtgagggcctcaggaagcttacaattgtggcagaaggcaatgggcatatcacatggtgatggagcaagagagaaaggaggaggtgccaggctcttttaaacaaccagctcttgtgtgaactaacagaacgagaactcgctcattactatggagaggacaccatgccattcatgagggatccacccctgtgacgcaaaaacttgccactaggcccaccttcaacattgaaggtcacattttaacatgagatttggaggaggaaaacatccagactgtgcatcatcgccatagagagtaggatgtcattcctatagaggttggggagttatcctcatagagattaaggacttgccatcctcatagtgagtagggagttatcaccattcagttggcatatgtagataaaatgagatgaaccaacatcccaagatggaacgctgtggatcattcatatttaaagggtatggtgtaaaagagaagctggcaaagtaggggaagtaggatggttattggaaaaacctggtgtcatgggagccaggaaaggagagtgcttatgtactaagatgtcaaatgtcagattgcacaagaaatgtagatactgagatgtgtccactggatttggcactatgaggttgttggtgatatttgtgtgaacagctttagtggaatgggatcaggagccagatacagtgggttcagcaagtagggaggtggagtttagaaaggcacttattgccaggagaattttaaaaaaaagcaagttagagaaagtcaagtaataagaactagtgtggcatggatcagctctctgggaatgctggagggagagaactgaaggggagagaagtggaataaacactataaaaagctctgagaagagaggatgtggcttcaccccacccaatcctgagagaatgggtggagggtaggcctaatattgtcttgttatccaaatattgtctttaccagctatcctttccctaaagatgggacaagccattcccagaggtcagttccaggcaacatgaccttcccagaaggtggggtaaaattttcctcattaactcatgtgttccccagagtctttgggtttttaggaatttctacaaagaatttcaaatattttacaagtcatttccaagtaccataatatattcttccttcagtttggtatctcaagcttttgttaaggtagagacacattttccttcactcagaacattgttgtaactctgaaggagaaaaggcatgtggaattactattgtctgcattggccttccttctgtggctgcaccactcctacttctgtgaatctgagcaaataagaaaacagaccacctgcatgtgagcaagaagcacacagattttgctgaatatgtggcttcagtggtcttcacgttgcttctgtgttctataggtagcccggttttatacagacagacaatctatttcacctgatggaatgaaaaggataagaatcatgtgaaaccaaacacataagagatggatgtgtaaggcataatacccatttagggattaacaatatcagctcattttttaaacttttaagctcaggggtacatgtgcaggtctgttatataggcaaacttgtgtcatgggagtttattgtacagattatttcatcacccaggtattaagcctagctcccattggttatttttccttatcctctctctcctcccaccttccaccctccaataggccctagtgtgtgttatgccactttatatatccatgtattctcatcatttggctctcacttataagtgagaatatgtggcatttggttttttgttcctgcattaatttactaaggataatggcctccagctccatgcctgttcctgcaaaggacatgatctcattcttttttatggctgtatagtattctgtggtgtatatgtaccacattttctttatctggtctatgattgatgggcatttaagttgattccgtgtctctgctattgtgaatagtgctgcagtgaacatatgtgtctttatgatagaatgatttatattcctttgggtatatatccagtaatgggatttctgggtcaaatgttatttctgtttttaggtctttgaggaatcactgcactgtcttccaaaatggttaaactaatttacactaccaccaattgtgtataagcgttcttttttctccacaaccttgccagcatccgttatttttttactttttaatgatagccattctgactggtgtgagatggtatcttattgtggttttgcattcctctaatgatcagtgatgttgagctttttttatatgattgttggccacatgtatgctttattctgaagagtgtctgttcatgtcctttgcccactttttaatggggttgttttttcttgtacatttgtttaaatttcttatggatgtcagatattagatctttgttggatgcataagttgcaaaaattttctcccattctgtaggttgtctgcttactctgttgatagtttattttgctgtgtatcgggggaaccagcccccaatatttcaacatacgttctttctattttccctaagtgttggccggtctgagaaataaagagaaagagtacaaagagagaaattttacagctggtcttccggggatgtcatcacgtattggtaggactgtgatgacgaccctgagccgcaaaaccagcaagtttttattagggattttgaaaggggagggggtgtatgaacagggagtaagtcacaaagatcacatgcttcaaagagcaataaaggtcacaaggcaaggcaaaattagaattactgatgagggcctatgtcccactgtgcatgcattgtcttgataaacatcttaacaggaaacagggtttgagagcagacaaccagtatgactagaatttaccaggctggaatttcccaatcctagtaagcctgagggtactgcaggagaccagggcgtatttcagtccttatctcaactgcataagacagacattcccagagtggctgtctatagacctatccccaggaatgcattccttccccagggttactccttgctgggaaaagaattcagcgatatttctcctactcacacatctatctataggctttctgcaagaagaaaaatatggctgtattctgcccgaccccacaggcagtcagaccttatggttatctttcctcgttccctgaaaatagctgttattctgttatttttcagggtgcactgattttatattgtttaaacacacatgttttacaaacaatttgtacagttaacacaatcatcacagggtcctgaggtgacatacatcctcagcttaagaagatgacaggattaagagattaaagacaggcataagaaattataagagtattgattggggaagtggtaaatgtccatgaaatcttcacaatttatgttcagagattgcagtaaagacaggcataagaaattataaaagtattaattttgggaactgataaatgtccatgaaatcttcacaatttattttcttctgccttggctccagctggtccctctgtttggggtccctgacttcctgcaacagctgtgccgaagctttttagttccattagataccatttgtcaatttttgcttttgttgctattgcttttggtgtcttcctcatgaaatctttgcccattcctatgtctggaatggtattgtctaggttgtcttccaggatttttatggttttgggttttacatttaggtctttaatccatcctgagttaacttttgtatatggtataaggaaggagtccagcttcagtcttatgcatatgtctagccagttatcccagcaccatttattgaatagggaatcctttccccattgtttgtttttgtcaggtttatccaagatcaggtggttgtagatgtgtggccttatttctgggtcctctattctttttatttttatttattttttatttttatttatttatttttgaggcagagatttgcttttgttgcccaggctggagtgcaatggcgtgatctctgcttattgtaacctctgcctctgggttctctattctgttccattggtctatgtgtctgattttgtaccagaaccaagctgttttggttactgtaaccctgtagtatagtttgaggtcagatagcgtgatgcctccagctttgttctttttgcttaggattgccttggttatttgggctctttcttggttccatatgaattttaaaatagtttgttctagttctgtgaagaatctcaatggtagtttaataggaatagcattgaatctataaattgctttgggcggtatggccattttaatgatatggattcttcctatccatgagcatagaatgtttttccatttgtttgtgtcatctctgactttttagatttattctgatccaaatgtgagtgaccatggcctgtcagccctcgggaggtcctgagaacatgtgcccaaggtgatcggggtacagcttggttttatatattttagagaggcatgagacattaatcaaatacatttaagaaatacattggtttgtttcagaaaggtaggagaactccaagtgagggctaccaggctataggtaaatttaaatgttttctgtttgacaattgcttgagtttgtcaaaagacctgagatctataaaaaggaatgttcaggttaaagataaatgattgtggagaccaagttttattttgcagaggaagctctcagatagcacacctcagagagagagagcaggttgtaaaatgtttcttttcttttcttttttcagggtaattagcatatccatgaattttttttttctgttttgaatgatttatttcccaccttctttttttaaaattatgcgttaagttctagggtacatgtgcagaacatgcaggtttgatacataggtatacatgtgccatgttggtttgctgcacccatcaactcatcattcacattaggtatttctcctaatgctatccctctccaaaccccccacaccatgacaggccccggtgtgtgatgttccccgccctgtgtccaagtgatctcattgttcaattcccacctatgagtgagaacatgtggtgtttggttttttgtccttgtgatagtttgctgaggatgatggtttccatcttcatccatgtctccgcaaaggacatgaactcatccttttttatggctgcatagtattccatggtgtatatgtgccacatttttttaatccatcactgatggacatttgggttggttccaagtctttgctattgtgaatagtgccgcaataaacatacgtatgcatacgtctttatagtagcatgctttataatcctttgggtattgctggtatagtttgaggtcagatagcatgatgcctccagctttgttctttttgcttaggattgccttggttatctgggctctttcttggttccatatgaattttaaaatagtttgttctagttctgtgaagaatctcaatggtagcttaataggaatagcattgaatctataaattgctttgggcggtatggccattttaacgatatggaatcttcctgtccatgagcatggaatgtttttccatttgtttgtgtcatctttggctttttagattgctgggtcaaatggtatttctagttctagatccttggatcaccacactgtcttccacaatggttgagctagtttacactcccaccaacagtgtaaaagcattcctgtttctccacagcctcgtcagcatctgtcgtttcctgactttttaataattgccattctaactgatgtgaggtgatatctcattgtggttttgatttgcatttctctgatgaccagtgatgatgagcattttttaatgtgtctgttggctgcatagatgtcctcttttgagaagtgtctgttcatatcctttgcccactttttgatggggttgtttttttcttgtaaatttgtttaagttctttgtagattctgaatattagctctttgtcagatgggtagatcgcaaaaatttcctcccattctgtaggttgcctgttcactctgatggtagtttcttttgctgtgcaaactttttagtttaattagatcccatttgtccattttggcttttgttgccattgcttttggtgttttagtcatgaagtccttgcccatacctatgtcctgaatggcattgcctaggttttcttctagggtttttaaggttttaggtctaacatttaagtctttaatccttcttgaattaatttttgtataaggtgtaaggaagggatccagtttcagctttctacatatggctagccagttttcccaggaccattcattaaatagggaatcctttcctcatttcttgtttttgtcaggtttgtcaaagatcaggtgattgtagatgtgtggtgttatttctgaggccactgttctgttccattggtctgtctctctgttttggtaccagtaccatgctgttttggttactgtagccttgtagtatagtttgaagtcaggtagcgtgatgcctccagctttgttcttcttgcttaggattgtcttggcaatgtgggctctcttttggttccataggagctttaaagtagttttcttccaattctgtgaagaaagtcattggtagcttggtggggatggctttgaatctacaaattaccttgggcagcattgattcttcctatccatgagcatggaatgctcttccatttgtttgtgtcctcttttatttcattgagcagtggattgtagttctcttgaagaggtccttcacatcccttgtaagttggattcctaggtattttattctctttgaagcaattgtgaataggagttcactcatgatttggctctctgtttgtctgttactggtgtataagaatgcttatgatttttgcacattaaatttgtttcctgtgactttgctgaagttgcttatcagcttaaggagattttgggctgagacaatggggttttctaaatatacaatcatgtcatctgcaaacagggacaatttgactttgtcttttcctaattgatacttctttctctggcctgattgccctgtccagaacttccaacactatgttgaataggagtggtgagagagggcatccctgtcttgtgccagttttcaaagggaatgcttccagtttttgcacattcagtatgatattggctgtgggtttgtcataaatagctcttattattttgagatatgttccatcaatacctagtttattgagagttttcagcatgaaggtctgttgaattttgtcaaaggctttttctgcatctattgagataatcgtgtggtttttgtctttggtatagtctgttgatttgggatggagagttctgtagatgtctattaggtctgcttggtgcagagctgagttcaagtcctggatatccttgttaaccttctgtctcgttgatctgtctaatattgacagtggggtgtaaaagtctcccattatcattgtgtgggagtctaagtctctttgtaggtctctaaggacttgctttatgaatctgggtgctcctgtattgggtgcatatatacttaggatagttagctcttcttgttgaattgatccctttatcattatgtaatggccttctttgtctcttttgatctttgttggtttaaagtctgttttacaagagactaggattgcaacccctccttttttttgctttccatttgcttgttagatcttcctccatccatttattttgagcctatgtgcattcgtttcacatgagatgggtctcctgaatatagcacactgatgggtcttgactctttatccaatttgccagtctatgtcttttaattgggacatttagcccatttatttttaaggttaatattgttatgtgtgaatttgatcctgtcattatgatgttagctggttattttgcccgctagctgatgcagtttctttctcgtatcgatggtctttacaatttggcatgtttttgcagtggctggtactggttgttcctttccatgtttagtgcttccttcaggagctcttgtaaggcaagccttgtggtgacaaaatctctcagtgtttgcttgtctgtaaaggattttatttctccttcacttatgaagcttagtttggctggataggaaattctaggtcgaaaattcttttctttaagaatgttgaatattggcccccattctcttctggcttgtagagtttctgcccagagatccgctgtaagactgatgggcttccctttgtgggtaacccgaactttctctctggctgcccttaacattttttccttcatttcaaccttggtgaatctgacaattatgtatcttggggttgctcttctcgaggaatatctttgtggtgttctctgtatttcctgaatttgaatgttggcctgccttgctaggttggggaagttctcctggataatatcctgaagagtgttttccaacttggttccattctccctgtcactttcaggtacaccaatcagacatagatttggtcttttcacatagtcccacatttcttggaggctttgttcatttctttttactcttttttctttaaacttctcttctcactttatttcattaatttgatcttcaatcattgataccctttcttccacttgatcgaatcggctaatgaaggttgtgcatgtgtcacatagttcttgtgccatggttttcagctccatcaggtcatttaaggtcttttctacactgtttattctagttagccatttatctaacctaaggtttttagctttcttgtgatgggtttgaacatgctcctttagttcagagaagtttgttattactaaccttctgaagcctacttctgtcaactcgtcaaagtcattctccatccagctttgttccattgctggcaaggagctgcaatcctttggaggagaagaggtgctctggtttttagaattttcagctttcctgctctggtttcaccccatctttgtggttttatctacttttggtctttgatattggtgacctacagatggggttctggtgtaggtgtcctttttgttgatgttgatgctatttccttctgtttgttagttttccttctaacagtcaggcccctctgctgcaggtctgttggagtttgctggaggtccactccagaccctgtttgtctgggtatcaccagcggaggctgcagaacagcaaatattgcacaacagcaaatattgctgcctgatccttcctctggaagcttcgtcccaaaaggggacccgcctatatgaggtgtctgctggcccctactgggaggtgtctcccagttaggctacatgggggtcagggacccacttgagggggcaatctgtccgttttcagagctcaaacaccatgctgggagaaccactgctctcttcagagctgtcagacagggatgtttaagtctgccgaagttgtctgctgccttttgttcagctaagtcctgcccacagagatggagtgtagaggtagtagggcttgctgagctgcggtgggctctgcccagttcgcacttccaggccactttgtttacctactcaagcctcagcaatagtggatgcccctcccccagccaggcttccaccttgcggttcaatctcagactgctgcactttcagtgaacaaggctccgtgggtgtgtgacccgccaagccaggcacgggagagaatctccttgtctgccagttgccaagaccttgagaaaagcacagtatttgggtgggagtgtcccgttttccaggtgtaatatgtcacagcttcccttggctaggaaagggaaatcccccaaccccttgtgcttcccaggtgaggcgatgccccgccctgcttcagctcaccctctgtgggctgcacccgttgtccaaccagttccaatgagttgaaccaggtacctcaattggaaatgcagaaatcacccatcttctgggtcaatcacactgggagctgcagactggagctgttcctattcagccatcttggaatggatccttctctgacttttttgagcagtgttttgtagttctccttggagagctcttcctgctttggctctcagcttgactgatgttggtgtatggagtgttagggagctttgcacattgattttgtattctgagactttgttgaagttgttaatcagcttaaggagctttggggctgagaccatggggttttctaggtataggatcatgttgtctgcaaacagggatagtttgacttcttctcttcctatttggatgccctttatttccttctcttgcctgattgccctaaccaggacatccaatactatgttaaataggagtggtgacagaggacatccttgccttgtgccagttttcaaggggaatgcttccaggtcttgccatttagtatgatgttggctgtgggtttgtcatagatggctcttattattttgagggatgttccctcaatacctaatttacagggagtttttaacatgaagaggcgttgaattttatagaaatccttttctgtgtctattgagataaccatgtggtttttgtctttaattctgtttgcaggatgaatcacatttattgatttgcttatgttgaaccaaccttacatcgcagggataaaggctacttgattgtggtggataagctttttgatgtgctcctggatttggtttgccagtattttgttgaggatatttgcatccatgtttatcaaggatattggcctgaagttttcattttttgttgcatctctgccaggttttggtatcaggatgatgctcatatgcctcgtagaatgagttagggtgaagtccctcttccctattctgggaatagtttcagcaggaatgataccaggtcttcattttttaccttgtagaaaaattgacatggcaagacagcttggtagacatgaaatcagaagtgggggagttagtttgattatcttagaggaggcattcttcatcactgtaggggaaaaaactttcaaggaaatggtgtacttgagtccacatgccaaggcaccttctttccccagaccatgctagagatactttgacagattattttagttgctttttttttttttaataattttgttgatcattcttgggtgtttctcggagagggggatgtggcagggtaataggacaatagtggagagaaggtcagcagataaacacgtgaacaaaggtctctggttttcctaggcagaggaccctgcagccttccgcagtgtttgtgtccttgggtacttgagattagggagtggtgatgactcttaactagcatgctgccttcaagcatctgtttaacaaagcacatcttgcaccacccttaatccatttaaccctgagttgacacagcacatgtttcagagagcacggggttgggggtaaggttatagattaacagcatcccaaggcagaagaatttttcttagtacagaacaaaatggagtctcctatgcctacttctttctacacagacacagtaacaatctgatctctctttcttttccccacatttcccccttttcttttcgacaaaaccaccatcgtcatcatggcccgttctcaatgagttattgggtacacctcccagacagggtggcagccgggcagaggcaccccccacatcccagacagggtggccaggcagaggcgccccccacatcccagatggggtggccgggcagaggcgccccccacccccaagacggggcggccgggcagaggcgccccccaccccccagacggggaggccgggcagaggcgtcccccacctcccagacggggcggccgggcagaggcgccccccacctcccagacggggcggccgggcagaggcaccccccacctcccagacggggcagatgctgggcagaggcgccccccacctcccagatggggcggatgctgggcagaggcgcccccccacctcccagacggggcggatgccaggcagaggcgctccccacctcccagacggggcggatgccgggcagaggtgctccccacctcccagacggggtggccgccgggcagaggcgctccccaccccccagacggggtggccgccgggcagaggcgctccccacctcccagatggggcggctgggcagaggcactccccacctcccagacggggcggcggggcagaagtgctccccacttcccagacggggcagcggccgggctgagatgctcctcacttcccagatggggcagtggccaggcagaggtgctcctcacttcccagacggggcagctgccgggcagaggtgctcctcacttctcagacggggcggccgggcagaggcgctcctcacctcccagaaagggcggccgggcagaggcgcttctcacttcccagacagggtcgcagtcgggcagaggcactcctcacttcccagacagggtcgcggtcgggcagaggcactcctcacctcccggacagggcggccgggcagaggcgctcctcacctcccggacggggcggccgggcagaggcgctcctcacctcccggacgggttggccgggcagaggcgctcctcacatcccagacggggtggtggccaggcagaggcactcctcacctcccagacggggtggcggccaggcagagacgctcctcacctcccagatggggcggtggctgggcagaggtgctcctcagttcccagatggggcggctgggcagaggcactcctcacctcccagacagggcggccgggcagaggtgctcctcacttcctggacagggcggctgggcagaggcgctcctcacttcccggatagggcagccgggcagaggcgctcctcacttcccggacagggcggccaggcagagacgctcctcacatcccagatggggtggtggccgggcagaggcgctcctcacttcccagacagggtttagttgccttttttattctatgtagatgaccccatccccaccatattcacatattccttcttcactcaggtacaaaattcagtaggacacgactttctgagtcatatgctggatttgaggagatactgaagccacaagactgaaataacttttaaactgtgggtgatttggctaaaagctactctcatctattatatattcatcttactagttttgctctcagaggaagttcctgtttccaaggtaaaggaacctttctctaactccacctaccttcctcctcactaaatgggtacagaaaatatgcttagaaaaaaacgcagaggaccctgatattgtcattctgaaatatcagtagtatctgtcacattttgacaggaactagatactaatcaatttataagattgagttttcatgtttctaaagtgcagatactctgtgttgatggttaaagagaaagccagctggttaggtgtcagatgatctctgacagtgttaccatagacatttaattgcatgaccatatcttatccagatggcatttctcgcttacacagatacataaccccagaggggcagagggagagatgtcaaatttccctcaaaatagaactttgagtccacccaaagtctaccaagtgagactttacaattctgcccaaagagtacagaaattacattgatctggcaagaaagaatgaatgggaacccaaaggtagctgcttgagttaatcaggttggtgagtggctgacagggtgctagagtgggcaaagtcaacattaaaccaccagcgcacaacttcctatgtacccaatgttcaccttcccagctcctatcatctttgccactttactctgaactggaaaccctctgtacattttttcctctttaactcaaagcctttagaactctcgagctcaagcagtcccctcctgcctcagcctcctgagtagctgggaccacaagcacacgccaccatacctggataatttttaaattttttgtagagatagggtctctccctatgttgcccagattagtctcgaactcctgggctcaagtgattattctgcctcggcctcccaaagcactggggttatgacccaccacgcctggccccacatcttgtttttcacataatgaaatgttttgaagacagtttgtgtcaacattcatagatctagctcagtctttttcatgtctgcatagaattatgtattatgaatgtggtagaatttatatatccagacatcagttgatggacttttagtcatttttagtcttttgccattacaaacaatgctgcactgaatgtcgctgtctatgcaccattttttcacatattcataagtatatcagcaggttaaatttctagaattagaattcttcagtcaaaggatatatgtgctttaccctttgatagatgttactcaattgcctccccatcaaagaggttctacaaatttttactcctacaaacatacaagaagtatctgttttcccacatctttgtcaacatatataatttctttactgaatttacagtaaaattcactttttaaggtgtaaagttctatgaattttgacaaacatataaagtcatttaaccaccatcacaatcaaaatctagaatatttctattatttccaaaagctcctttgtggccctttgtagtcaatcctctgtgcccatcctgagcctttgcctactgatctaatttctgttcttagttttgccttttccaaaatatcatatcaatgaaagcacaaagtaaatagcctgtttgagtctggtttcttttacttagcataatgcttttgagattcatacatattgttacatttatcagtagtttattccttttccttattgctgagtagaatttcattgtatgattgttcccaatttgtatacatttgccagttgctagcatttggattgttttgaggttttggcaattatgaataaagcagttggaaatatctaggtacatgtctttgtgtggacataggtctttgcttttctcaggtaaatacctcagtgtgggattgctcaattttatggtgagtttttatttaactttataagaaactgccaaacactttctcaaagtggctttgttatttcccatccctagcagcaaggcacaagtgtttcagttgctctgcattcttaccaacatttcatattgtcaatatttaaaaaattttggccattctaataagtgtatagtgaatattatgtatttatcaaactttaaaaatgttgctattctgaaaattatttttttcatttacatttctttaattaagggtagttagaatacatttaatatgttgataacacatatttctttttctttgaattgcctattcatcttctttgccatttttctattaggtgagctgatcattttcttaatgattttaaaatgacgcttatatattagtgaatccaactatttcataattgttgcaaacttttgtcattttttactttgatttgttaacttacagaaatacaatttacaaattttgaagagaagaggagactttatttcttataaaaggttacagcctgcaggatggccattttgacaggttgggaagtatagcctccagtcagaagccagaaacatatctggagggaggggcaaagggaacaggaatttacacagagctggtggccaaatatacatattcaataagctatagaaggagtcatgaatatttatgaagggagaaccatctgcatgtgtaattgagccttctgcttctccatgttcaaaaaatggtggtgaccttaggtggagtttttggccctctgacatcaaaacatgaagcagaggatgtgaaaacactagctgcctattcttcatagactggccagaaccaccccatagttagtggtctcttatcaggcagaaaagatggggcagcatcagggagtcggttgatatcagtggtggagccttttgaaagggctggtttctgttaggcccttgagaaggaaagcctactcctggttagcaagggagagggtctgagcccctcccaccctccattccatcttggccgagaacgcagttttcaaggtttctctggggtccccttggccaaaagatggtctggtcagttggggggcttagaattttattttgtatagcttatagcacatttttctatagtaatatttgtatgtaacctctaaattttgtacctcattggtgcaaaaataaggcggtataaatgagagagtttataaaggcaaggtatacaagacaagactataaggctaggcaccctggttgagtcagttcaccctgcttccactattatccagcactagagatgcatggccaatacagattttcttgcttattctcaccatctgcaaataaccaaggcttgttgacaaatgcagctgctttgagaaagggtagagtccccagggcacaatttttcaatttcagatgtggaagaagactcgtttagtggaagcaatgcgcttattgctgaggccatcaatataccagattgttacgccttttggctgggacacagggaattcctgtctgcagagtcagtgacatcactttgccggaaacagccttcctccctgccaaccctacacttaaacatgggattccacactgaccacaaaggcctattattctcaatgcaatctatgggcaaaagaatttgagggaggctagaaggggtgggggcaagagagaatggatggtttggttggaggaagtgagaagaatcagggaagaggactcttttgcttcctcatttcccatacatagagcctctgtcaccatttgatttttgcgatcattaacatttttagagtcaggtataaccaagtgcaaaccagttatgttagttacatgctgctaatctgagaagagtgtgttgcccaagaactgtgggtggggagcctcaggttggctgaatctgatttgcaggaagagcttgttctgcacccccacccacatctacactatctggatgtcaccaaataggctctccccacccaaagctgagtctcaaggggtccactcagtatcagccaggctacgttgttaagataaatgcaattgttttctaactaagaagctgtgaaccgagaataattggctaattaaaagttcaaagagtggaaataaaatagcattaaaaagagccagtaacttcctctgacgtctgtggttcaagagatcagtggaacaggacatgggttatttactcaattaccttgtctttctacctttcttttcattctcacccccaccccttcccttccttcttatttcctggctctattttcttacctgtgtctcccaacccaatgtccatctcatttttcctccttcttttttgccttttgccctttaactaactggttatcattgagatctttaggatcaaagtttgtctttagcagttgtgtttctattgatgtttgtgctgacttctttaagtaaaatataggcaggaaaaaacccgctaaattaaactgctttatccttgaatgtgactctggattggttaattggagaaatatggggttggggtagaataagacctttccatttagatagaattttggactagtgcttttgcattgggtcagctgagaaagaataaaactgaaaaatttctacgcatctctaatgcaggacaatgatttaaggcattgaagtggaactgagacacttggatcaaatccctgttctgccacgtgcaaggtgcatgacttgggcaagtcccttaagcttcctgagaaacacagtctcagccttttgtcacttaactgtaagcttctgactgtcagggatgagattcatgatttcaaaaggtaggacattggtatcctcagtgagaacagtccagacaacccttccagccaaatcctcaatgttggtcactttttatttctggataatgagattggctaccacataacagtactggtagcacagcccagacactgtatgagcctcagtcatgtattgtagggtagggtgctggttaaaagcctggaccttgaagccagaatgcccgtgtttaattcctggccctgttaccggtggcagctatctgagttactggcagtgtatccatacgggtctgcagtaacctcaattcttgcctcatcagaagaaagaatgtgagggatataaagtagaaaaagagactgagtcaagtttcagagcaggactggaagtttattgaaaaggctttagaacaggaaagaaaggagagaacccttggaagagatccaagtgggcaacttggagaacaaacaacgtgtttagctgtgatcctaggactttataggcggccatcttgagcccttttcccgtgattcttcccttagggtgggctgcctgcacgcacagtgccctccttacctccttgagcacacagtgtgtttaggaagttgtgtgcatgctcatctgaggctttctttccttttccggtggagtgctcccggcaagtcatcttccaccttttgtctcttaatgtgcatgcccaggaagttgcttctccctggtgcttgaattcaattaacactttaatgttacagctgtggatcagcagattttctctccctggctccagctgccaaattatcatttttagagaggcaatgtgataactgtcaaaccatcacctgatatttctagttggtgggggagaagagccctttcctgccatgtctgtctaactacatgtaacagcgcaacatttacatcagtgtaactttgggaagttacttaatctctctgtgactcagtttcctcatctgtaaactaacaataatgataattataatagtgactgtgagtgtgactttatttggaaatatagtagggtgttcagagatgtaattaagctaaggatcttgagatgaaatcatcttgaatttagggtgggccctaaatctgatgactggtgtccttatgagagaaaggagaaggaaacgtgacacaaagagcaacagggggaaaggccatgtgaagacagaggtggagattggagtgatgcagccacaagccaaggaatgctaagaagctgaaaaagacaagaaagacatctcctccagaaccttcaaagggagcatgcccctgctgataccttaacttttggacttctggcctccagatttatgaaagaatacatttctgtttgaagccagcaagttcatggtaacttgttgtggcagccctaaaaaactaatacagattttatagagaagatgatagtattacgtgcaccttataggattgtagtgaaggctaaattgatggctgcatttaaagtgctaagagtagaatctggaatatagtaagaactctttagtataggctattacgtgttgttagctcattgaaccttacatagcaaccctatgaagcagatactattgtgactcccattctgcccatgaggaaatggaggcttacagagactaagcaaaggtaagcttatctgaactctgctctagcttgaaccatcccccagaagtctgtggagtttgactaactgctgatggatcctgatgattgttggctcggtgacccttcctgatgatggtctctcagaaaagactctccagtgctgagccatcaagaagtctagaaggcattgagaaggctgtcacatgtgattatgtttactcctcctggatgcgtctgcccagacctggttttggcacaagctctgctctgatggagccaggctctgtccacacttggctgtgtggcctgacctcatttgagtagcctcagcacatcattaccacaagaggcagggatgtgccaccctaaaaggccacaccctctctctccagtgacttcaacagcccccaatggttccttgttcacccctaagttgctaagcatagattatatgaatgactttagaagtaagtcacatcactcagaataaggcaaagccctcactagtgccctcaaggccttatgagcaggggaccccattgatcctctgaccagttcctactactctcccctcagggcctttctgtgtacagttccagatgctgtaaagctcttgcctcagaggtatgcaggctttctccctgtgatagaaatcaccttctcaggccagtcctaatcactgcatccttcctttttaccttccttgctttttcttcctcctcagcacttaaaattatgtaatacactgtaaattttgtttatcttgcttattgtatttttctcccaactagaatataagcaccatgaggatagggacatttctcactttgggttattgctgtagctcagagcctagggcaggtctagttcatagtaataatgtgttcaataagtaattattgagtgaccaactgaaaaaatgaatgaggcatagtcccctctccaacaactatagaactcccaaactgaaatggttcaagctatatctagaggtagcacatgaagagaggactactgacataactgagctttgtagagtatagggggagcatagcttccaactgagcttgattttgaaggagacaaaaagacttggagaatgaggggaatggaattacaaatgaaggcgtcccacactgagaaaagttcagagaatccaaaattcattcattcattcattcattcatacaacatgggatataccaatgaacaagccagaaaaaagtccctgccctaaggagcttacattctagtagtcataatgtcaggaattctcatcttggacccaaacagatctgttggttggaatggtaaaatgggaagggctgaaatttctgaagggcttggaggtctaggtagaccagtgtagctttcatctggcacacagcaggacataggttcttgataaggtagagtcttaggaacgtcaattgtggaagatttctatagccacatgaaggagggattctgatagagaagataattaggaagtgtgggagtcaccagaaagggccattgtagaagatcagatatgaggtaagggtgactggaatcaggggatgtggatatcactatagaagaaggtgggtctaaggggcttgggatgaaataactgagagaggatcttcaagcccctgagtgtgagaacaacctacatatgtgtcctcaagaagagttccctgatggagaagaaggaaggtagcaggggtggtgtggagactttgactctgtgagttggaggaacgacaacgccagattaggaccagtcttctgagcttcagtgattgttccatcattaggctatgtaaacacaggaaggaccacaacattccttgaatgtttgctcaccaatgcttgtccacatttgctgttttgttctctatatgacaagaaaagtttagtccagatgtgactcataacaaattggaaacaatttgaatctagtcagtcacattggatctgcaaagcaaaacttttttttgcctgaaatccaccacatctgtcaacaccccaaatctgtttattaatggagtaaaattttaagctgttatatttttgttatcacagagtagcaatgctgggatttctctatacaacagaattttgactatggacaaaattaaataatttgtttgtttgttttggagacagggtctcactctgttgcccaggctagagtgcagtggtgtgatcttggctcactacaacctcggtgtcctgggctcaagcgatcctctcacctcagcctcccaaatagctgggactacaggcatatgccaccacgcctggctaatttttgtattttttttgtagagacagattttcaccatgttaccccccagtctcaaactcctggactcaagtgatccgcccacctttgcctcccaaagtgctgagattacaggtgtgagccactgcaccctgccgagattaaataattttgattttcaccttagtatgattataactggacatcatgatggctgtttctataagaatcaaaagaacctttgcttcctttgattcttataaaagtcttgaaggtatttttcctctgacacagctaattggcttgaaatcagcctgtgttttttcaaagcttgggtttccttcagttttatctctctgtcaggtgaagagttgaagttaatattaccttgctctctcactttaagctgaaaattcccctcccttgtcacatcacatgaaaagaaaaaaatgcaaaggaagtggccgtcttaaattctccagtacagtaagccaattcaaagggaaaacaatgacaacactttgccattggatattttggtaaaatcatttgttgaaattctgtttcgaaataccatttcacattgtatgacagaaaccacatttctgttatccacaaggcaaattaagggcttttcagggggaagacaatcaatgtgaattttccataatagagcttgactgtggcagtcatgggatctgaaagcactctgggggtctaagaagaaggggcagttacctaagtaattctctttttatgaacacatccaagatatgtcaacctgcaccccacctctagcacctcttctttggcaccacttctgagatgactctcctgcttcctggatgtgatcagggcttttgaaaactggctgacatatagtccatggaagatagcattttaattactgctctctgggtaatgtagtcagttacatgaaaaacaaacttaaccattgtgggttcttttggtaataaaaacatttgaaaaatcatgtatgaaaaattcctaaattttctctctgacctaaaaatctttttcttattatatctttaataagaaataagagtaggatgaaaggcttgcatatattctggtaacctggatatcattgcaaaagctgggaaaatgtggaaaagtgtacatctaactcctcaatgacaagaagaagttagtaaattttctcgttaggaaaaggaagaaataattatagtcacatcaagttggttcccacctctgggttcttgcagtttctgttccttcttcctcttatgttcttactccctctccaggctggtgttttctcctcaaatgtcaccttcaaggtctcggctcaaatgtcatcttctgagagaggctttcttgaccctcaatctgatacctttcccttcattcccaattctaccgcaagtcactctatcaagttccttggtttgaatttcttcttagcacatattgtgacctgaaatcacctatttatgtgcttcttttctggtttatctgtcttgctaactagattgtaaattccaaagagcaggggccttatcagtttttctttttttattgtagtaacttggatgctaagaatagtgcctgaaatggccatggaaggaaaatgagattgcaagattgtcatatttacaaaaacaaaagaagttaacaagtagaccttgttgaatagcttgagggagtaaaacattcaaaattttattatggtagaaacattgctacagtttgtttgttgttatatttataattggttgttttatttataattgcttatctaaaggacatgctgcttagggctgtgtttgtcaacatcacaacgttgggaaccaaagtggggtgcccttagagggttcttttccagattccagaacactggcatcaaagaggacatctctcccataccagttttatccagatgttttagcttcaagtagttaaaatcctgactctaattgggtcaaagcataagttttatggaaggatgggctcagcatttgttgatttagcagcttaaaatgccatcaaggactcacgttctctacatctctctgctctgccatcattgaatgccatcccttccaggcaggacaatgtttgaggatgaagagagaatgttttcttttttccctagacttgccccagaagacttcctccacggtcacatgggccataattaggtggcatacccattattaaaccagtcactggtgagggaatgaaattacacagacaagtccatccctgagcttgggggaaaggcaagcatctgaacaaaatggagtttcttttgggaagggagaagcagggaagtgctgtgtatttcacctgctcttccttgtttggaagcaatagataatgatgttgctaaaactttttctcctaaattttgtattgtttggtctgatgggtaaagactgcctcaagattctggggattgaggtggattggagacccataccttaatccaagcttagacttggattaagttcaagcttctgctcaagagcttcagagagagctcccatttcagtgcccagccagcttctacgtttgggaatagtttggggagttgagagaggaggaggttgagttgtcaaaatggagggaatggtgcaaccatttcatttcctgttcacttcctctatgcaatctgtttacatctgaccaaagtagcttttgccttttttttttttttttttttttgagagggagtttcactctgtctccaggctagagcacagtggtgcaatcttggctcacagcaacctctgcctcctgggttcaagtgattctcctgcctcagcctcctgagtagctgggatggcaggtgcacgccaccatgcccatctaatttttgtattttcagtagagacggggtttcaccatgttggccaggatagtcttgatctgttgacctcgtgatccacctgcctcagcctcccaaagtgctgggattacaagcgtgagccacggcacccgtttttggttattatttttttgagatggagtcttgttctgtcgcccagcctggagtgcagtggtgcgatcttggctcaccgaaacctctgcctccggggttcaagcgattctcctgcctcagcctcccgagtagctgggattacaggtgcccaccaccatgcctggctaatttttgtatttttagtagagatggggtttcaccatattgacctggctggtcttgaactgctggccttgagatccacctgcctcagcctcccaaagtgctgggactacaggtgtgagctgccgtgtccggccacttttgccttttatataattctactattggagcttttctaatgtcccatgacagaatgagactaaagacaaaataaataagataatatgaattatgatccaaaatgttcaagactcctcagcctctatgccattaccaattgcttactatgtaagggtggtttaaatgcaaggggtatgtatgtcaagccaggaaatgtcatggaatagtgggatttgttgtttgatgatacattcttaatactttttaacatcataaacattttgtggtagatttcaaaaatgaggaggggtattcttgttttttgttatttgttacttctaccttgatagatctgtgtgaactgttaaacagccaatttggggctcttctcactcctcattccatatctgatcactgacctagttttgtccttgccacagccactaactcagtcttggcctttgtcaaagtacaaacaaatccttttgttcttgaattatttcccaattactctgtaagtacctcattgataaaaaagattggcttttaatctgtctctgatgtctccaggtagccattacaagaccagacagaaaggggaggaaaatcagtgtttttgatttcttgttggtatttttttcttctgcttttggttttagagtctaacgtgaagacattttgctccaagaatatcctagccatccttggcttctcctctatcatagctgtgatagctttgcttgctgtggggttgacccagaacaaagcattgccagaaaacgttaaggtaagtcaaatatatctgtgtgtttgtgtgtatgtaagaggagatctgggtgggacagggggaggagggataaggtatgtagagcataggggacgagttgaggttctaacagcccaggaacaagtcaatttccactggattaggggagtaaaatggaaataggtgctcattctagaagagtaaatgccttgaatcattagtggtgggaagttaactgcctttatgattgtttagtaaactcattaaattgatactctagcagagatgaatgctttattcaccttatccagatctgtgtaatactatgccaagattctatattctagtatatttccacttcttcatcatgggtgaatcacaatactgcactctgttctttttacttcattattatcactatcaccaaaacaataacgtttattatacaactctgtataaagtactttggaagtcagagattgaggagaagacatgtttcttatctccagatatagtaaagaatcaaaatcaataaaagcaaatcagaaaacatatacgtgtatcaggtatagtcatttgaaatgaattcatggataggcagatttcttgtgacatttctacatttgaacaactagttaatatcattaaagatcattaggatcattaactttaatgtatttatgttttctttccagttcatcaaagtaaaatttcagacatgaatatctcacaagtactttgtaatatggtcattatattttttaatctgttaattaaaaagcatgtggtaaataaaaatttatactataaatacaccattttaaactttcactgaaattatagtaaacaaatatataagggcccagatgataccaatatgctaatatgcatgtatgtacacatgggcagtaatatatctagaagttaacttgaccatggaggcctgggaatacatgtgtagaagtatattctcttgtatttgaagatgttgaactgggagcctggaaggatggttgtgtatgccaggcctctgaaacttttgccatccacccaaatcactgtatagcagaggcgtgggtgtcacactggcatctttttgtcaagttcaacccagtggtgctgtgtacagcagtccctttgtcaagacagaaggctgatactatctcattgttaagggtcgcttgccttttaatgttgactgatgttgtttccttggcaaaacttcactcacagttgaagcctcatgacatcttggttccattatttgtttaccagctccaaaaatacatggttgccttcttaatttgacctttttacatgttcagtattgcatcattggagagggggatgcctaggaggcaaaatccatgacaaacttgagttatgttcccaagaatatgtgtggtcatggacgaccttccctcattcacagtggtctcctttaagtctcttgtgcttctgcattgttatatgggcctggcaaaatggaacaaggtctttggcattctttaaataaaaggtaggagtattgaagagcagtcattggcatctgaagtgaatctttttaataacatcactgatttattttatacaaagatagttttatatatgcaaactagccatttgttgaggttatataataattttagtaagattcctggcatatattgggggcaaaatatttcaggaacttgtattctggtgatggctttaaaccagatgtgctgtccaatttgatagccactagccacatgcagctctttaagcttgtcaattaaaattaaataaaattaaaaattctgtccctctgttgcactagccacatttcaagtgctcaatagccatacatggctggtggctactgtattggacaacacagatatagaatattgccttgctgtagaaagttctattggacattgccactttaaagcatactcttgaatgataactctgaagtcattcaaaactaagtttaatgaatagggtgtatgataaaacattttataaaatctagaataagaaacaaaaaaactttttttcttgcatggtttgtaaactagtaccaggatcatcccaaatatcatgggctactaaactggtttgagtagtttattgaaataaatgtatttgcttccaaaaatgaccatttaaaagataacacttatttggatatttgtactgatacatgttttttgtttgtttgtttgttttttgtttctttgtttggggtttttgtttgtttctttttcaagatggagtctcgctctgtcgcccaggctggagtgcagtggcacgatctcggctcactgaaagctccacctcctgggttcacgtcgttctcctgcctcagcctcccaagtagctgggactacaggtgcccgccatcacgcccggctaatttttttgtatttttagtagagacggggtttcaccatgttagccaggatggtcttgatctcctgaccttgtgatctgcctgcctcagcctcccaaaatgctgggattacaggcgtgagccaccgtgcccggctgatacatgtgttttgagagcacacaatgacatgactttatgaccatacttcattcagcagttcttcattcattttttataaatttatgcatcgacaattatttattacactccagtctggctgacagagtaagactctgtctcaaaaaaagtaaaataaaaaatattcattgtctgtgttaggcactgggctacacaatagggaaggcagtatatagatatgactgagcttaccatctggggaagcaaacatatttaataacacaaattattaattgtaattatgataaattgccaccaaatgaaagttttggggccaggcaagtcttccctgaaaaaatgatactaaaataatatctgaagaatgattggaagttagctgggaaagacataggtaaagggtagtccaggcagggccgagcacggtggctcatgcctgtaatcgaagcagtttgggaggccgaggtgggcagattgcctgagctcaggagcttgagaccaccctgggcaacatggtgaaacccaatctctactaaaatacaaaaaattagcttggtatggtggcgcgtacttgtaatcctagctactcaggaagctgaggtgcgagaatcacttgggccccagaggcggaggttgcagtgagccaagatctgccactgcactctagcttgggctacagagtgagacgccaactcaaaaaaaaaaaaaaaaaaaaaattccaggcagaaggaaagcaggtgcaagagtcctgaaacaagaaggagttggatatctcctaggaactagttggagagcaggagtgggccacgtgttatataaagatggggaggtacgtggtgcaggccctgcaagacaggttgaggatttcagttttaatcctaagagtagtgggaagctagtggtatgatcagatttgtttttgcaaagatcactctgatttcaatgaattagaggaggatgagatataggaggataccaggaagaggctacaagaaaaatgtggaaggagggggagcctttgggttcaatttttgaagaattgttttgagtgttggaaagccaatgggaaatgtcaagaaagcagttggataatcagatttggacctttcttttctaagcagatatctactgctgtgctcaataaaaatataaaacaagccaaattttaaattttcaaagagctacattttagaaagtagaagaaaagaggtgaaattaattttaataatataatttatgtggcccaatgcatccaaaatattacctcaacatttcatcaaaataaataattgttggctgggcgcggtggctcacacttgtaatcccagcactttgggaggctgaggtgggtggatcacgaggtcaggagttcaagaccagcctggccaacatagtgaaatcccgtctctactaaaaatacaaaaaaaattagccgggcgtggtggtaggcacctatagtcccaactacttgggaggctgaggcaggagaatcccttgaacctgggaggtgaaggttgcagtgagccaagatcacgccactacactctagcctgggtgacagagcaagactctgtctcaaaaaaaaaaaaatttcgtttttgttttgttttgttttgtttgttttttgagacggagtttcgctctgtagcacaggctggagtgcagtggtgcgatctcagctcactacaacctctgcctctcgggttcaagcaattctcctgcctcagcctcctgagtagctgggactacaggcacgtgccaccatgcccagctaatttttgtatttagtagagacggggtttcaccttgttggccaggatggtctccatctcttgacctcatgatctgcccaccttggcctcccaaagtgttgggattacaggcatgagccaccaccatgcccggccaaaaaaaaattgttaatgagatatgttacattcttttttcatactatcttcaaattttaacttatggcatatctcaattccaactagtcacatttcaagtgctcaattgccagctatttgttaccctggttaaatagcacaggcctagattaaagctatgtctctgatggcattgattgactgaagccttagaaatggatgaggtcatctaggatggggttataaaatgagaagagagtcaaggtccaagtcctgagaagctctatcatttaaagcaggggtccccaacccccaggccatggaccagtacagcaggaggtgaggaacacgcgagcgagcaaagcttcatctgtatttacagttgctccccatcgcccacattactgcctgagctccatctcctgtcagatcagtggcagcattagattcttataggaccgcgaaccctattgtgaactgcacatatgtaggatcgggattgcgtgctccttgtgagaatctaatgccggatgatctgtcactgtctcccgttacccccgtatgggactgtctagttgcaggaaaacaagctcaggcctcctattgattctacattatggtgagttgtgtaattatttcattatgtattacaatgtaataaaaatagaaataaggtagttcacaataagtgtaatgcacttgaatcatcccaaaaccatttccccctcctcaccacctctgggtctgtggaaaaattgtcctccaagaaactggtccctggtgtcaaaaaggttggagaccactgatttaaagggtgaatagggaaagaattcctcctaaggcataatgataacattatttagtgctttgcagttataaatcatttccacatgcatttccattttttcttcccgtgaatactgtgaagaatagaaggttatccccattttttttttttttttttgagacggagttttgctcttgttgcccaggctggagcgcagtggcatgatctcggctcaccgcaatctctgcctcccaggttcaagcaattctcctgcctcagcctgctgagtagctaggattataggcacacgccaccacacccggctaatttttgtatttttactagagacggggtttctccatgttggtcaggctggtcttgaactcccgacctcagttgatctgcccgcctcggcctcccaaagtgctgggattacaggcatgagccatcgcacctggccatgcccattttatagataacaaaatcaaagccttagatgttctctcacccaaggcagagggggagctaaaactagaatccagttttctgatccaaagactaatgttctttccatttgtcttagtgagtttttccaaacagcacatcctattaacagaaattgcatgcaggatgtttattttgggaagtgattccaaggaaacaaggaagaagggaaagagagagttaggagcaaattaccacattgggccactgaggcttgatcctcccagggaccctctcaagagctgtggagagtgaactttagaattgtctgccctggggatttatcccctggttctcattatctgttggtcaagggttgctcccatctggtgttaagtccctgtcacttccaggtttgcacgtgtgtcagaggggtcatgtgggtaccacaggtgacaacttaggcagcaggagagaagctgctgggcagaaatagagagataaggagatactgctggggctggagtaaaaagttggccaagatgtaaaatggtcacaagaggtatctgaagtatcattgcacctcctgatttttgtggaggtgagggttcttcgtacaaataatttcaatataatagagatatattcatgcagagacagtgctatggaagcccagagaaagaagctgctaattgtgcctgtttacatggaggcttcacagagaaggtagccttggagctgagtcttaagtgctatggcttgaatgtttgatccctccaaaactcatgttgaaacttaatccccagtataatagtattaagaggcagggcctttaagaggtggtgggtcatgagggctctgacctcatgaatggattaatccattcatggataaatggattgagttatcacagggtgggttagttattattagagtaggtctgtattaaaagctagtttggctctcagtatgccccctttgccatgtgatgccctgtgccacctcgggactctgcagagagtccccaccagcaagaaggccctcctgagatgttgcctcttgaccttggacttcatagcttctagaactgtaagaaatacatttattttttaaataaattacccagtatcaagtattcagtgatagcaacagagaatggactaagacaaatggtaaggagttttctagaaagtgggataggacatgttccagacaaagattatatcatgtgttgaagagtgacagcttgaaatcatatgcaatccctggggaatcagcagctcagtatggttagattgttgaatatgggggcaggaaggagaggtggaagaggaggtccaagtctgagcttagtatttttggcttaaaagtgggcatctcatccattaaactgcagtggtgttcaagcttggatccatgttagaagcacctgaggagcttttcaaaaatatggctgggccccatctcaggtcaattaaatcatctttggaggttacagttaaataaaaatggttcaaaatattgtagatcaccgggcgtggtggctcactcctgtaatcccagcattttgggaggctgaggccggcagatcacttgaggtcaggagttcgacaccagcctggccaacatggtgaactgtctctactaaaaatacaaaaattagctgggcatgttgtcaggtacctgtaatcccagctactcgggaggctgaggcaggagaattgcttgaacccaggaggcagaggttgcagtgagctgagatcacgccactgtactccagcctgggcaacagagcgagactctgtctcaaaaaaaagaaaaaaaagcccagggactgatacgttctaaaatcttccatgtgattctaatgagtagttttgattgaagaccactgctttgaagggtttcatacaaggaagtgatgcccagatttgtgttcccaagattccttttggctggagagcagattagaggagagaccagttagcatgctcctgccatggtctaggcaaggcaggcgaggccagaattaaggcattgtctgtggggtaaggggaggggataatgtgaaagacacttgggttgaccagatctttgtgacaaaattcctttgaggaccttttaagattaagatggaacaggtaccttgggacggttaatgctgagagaaaactccgaatgcttctgtttaaagagggtggtggccacaagcctctgttggtgcaacttcatacatggaaagactttcagctgtcctgtactcacttcctctgatttgtcatccctgtcctcttgcagggatcattattctgcctgcctagagtacaacacaacatgggccatggactcacattgccttgggtttgaatcttcgctgtgctcttagggtcacaggagttaacctctctaagccttagtttctccacttgtatgatggaactgatgcttcttctcttgtaagattactgtgagaattcagtgggataaagtacatgcaaatatgagtccagagcagaaggcctggcccactgcagacactcagtgattgataactcatgtcttatcatttttgcagcttacctgccttagtgacaaattgacagttatctttattttattcccactgttccccatctgacttgcccttgtctagcccatttcaggtcagcccacccatgctgatgatccagtcttgtcatcttcctgcctgacctagtttgggttcagccctgctggggagatagtgccctcatgcctgggccacatgtggcataacacagcaagaactctttattgttctgaaatgtttacttgcccagctacctaaaaggttataagcacattgaggacagggaatggatttcatttgtctttgtttgcattttatttattcattgactccattcattcatttaacaaatagccattgaatatcaactctattgtaggccctggcatatattagtgagcaagatgggcaaatttattatacccttgttttgaacttatagtataatgagggagataatcattaatcaaataatcataaaataaatgttaaattacagccagcacaacatctgatttgggtagttgctccagagaagtttgctgactctgaatagagaaagcaccttgaacagataaaaccgttccctccttgtatgtgaagaacccaggaccaacctggtagccaggcagtgtcagtgagggaagcagacctctgcctcagagttctctagagatcctagttccccactcttaccctcagagccttctcagtttgaacctccagagtgcagggcctcagaagctacatgtgttagcaggcatcctggggtgttctcatgccactgaagtctgtgaaccactgcctgtgagacacaatgagaacttaaaaaaaaatagccttaatgaactgaagagtcattagctgtacccaagactccccctgggaaagtacctttgttctggtggacctaggtggggcggtagctttgacgtctgcttggttccccacttccttgtctactcgtaactgaacactggcagttagtggttgtcagatattcttttagcacaaacattccacattttggcacacactgagtctctgtcacacaagcaccagactgacccaatgccaaacaactagccttcattaaacgctgcctcttctgtgaatgcaggctcagggaccagaccactttgattttaatcccagatatgctactttctagccgagactttgggcaagaaattctctctatgcctccccttatatgtaaaatcaagatagtaacagtacctacttagaatatggttgtgagaattaaatggaataatacaagtgacttaattgtcagagcgatgagcacatcagaggtcctcaatggagactacctgctttaatgaagatatgtcctatggaaggcccttagctattagtgtattatggtcactgaaccagtactctgcaggatttccagcttctgttaaagggtaatgacctttcctcatgcatctgctttttcaaaatgaacaaaagtgctgttcttagataagcatttgtgattttatctttttatggagactttggaaagatttgctctgatttccaacctcgaatactcttggaaaatatctgtattatttttactctattggattttaatgtgtgttttagaaaacaacatctgcagatagatggtgttgcacaacaatgtgaatatccttaataccacaaaactgcacttaaaaatggttacaatggtaacttttatgttatgtgtgttttacagcaattaaaaaataagacaataacagaactgtggtttgtattaaagatctagtaactctaattaaagaaaaaggaaaggaagaaaatggtctctaaatgtttataggccctactagcatctctgtagctaatctggtttgtttatagagtactagagtcttactcaaaattataagctttgtttataaacccaagctcactgagacagactgatgaggctgctgaagttaccattaaagctacaggaacttttaagaaagtttttgaagacacactgtgtctgaagggaccatgaaaagttaatgatcatacttgcctgtgttaccagatgtcttagtctgttttgtgtggctgtaacagaatgtgacaaacttggtaatttataatataaagaacagaaattacttttctcacagttctggaggccaagaagcccaagatcaaggtgctggcaggcttggtgtctggtaagggcctggtctctgcttccaagatgatgccttgaactctgcatcctctggagggaggaatgctgttcctcacaatggcaaaagagtaggagatagcaaactcactccccaaaccccatttaattgtggcattaatccatttaagagggcagagtacttgaatacctaaatacctcccactagggctcacctcctgatgctgatgcattggtgatgaagttttcaacacatgagttttggaggggaaaacagtcaaaccacagcatctgtcttatgagctttttggggatggtgtaggacaactccagtggtactactttatattagacaatgaatattaacctcttttagggctggaaggaatttaggaaccatccagttccaaccccctcatttatccatttgattcaataatgatctgttgaattctttctctgtgcctaatgtatagtaggatataccatcgtggatgctgtatatactgtggtaaacaaagtagacctgccctcatgtagcttacaatctaataataaagatagatattaatcaaatagctgcataaatatgtaattacaccatgtggccagtaccgtctttagagggaaaatacaggcattctgatcaggagggtaggatctaaactcaggaggtcagagaaggctgagatgtcaagtgaagggctttctcggtaaaggccctggagcagaaaccatgagacctatgggcaactgcaagcaggccagttccaccagaggtgttttctgaatgagaagagggtgaaatattctacttctgtggagccaggaagcaggctgtctgatgctctagtttctctttctttctgcttctaaatagacttacccagaagcctggtactatgacatttgtgtaggtagaattgtttccatcctaaggagatatctgccccatatctatacggcctccagtctcagtgagcttagggtctgttgcgcctacatttccaggtcttcaccaaggcccctgcattggtgtttccatgaaccaagcaaggtcacttctactgttcctctttctggaccagcacttctatccatgcaacctagctcatgaagatcggttatgatcttcatgtgatcactgcactccagcctgggtgacagagcgagactccgtctcaaaaaaaaaaaaatttaaaaatttaatttatttttagactcatggggcacatgtgcatatttgtttcatgggtatattgcatgatgctgaggtttgggcttctaatgatcctgtcacccaagtagtgaacatagaacctgacaggtagtttttcaacctttgacctcctccccacctcccctcttttggaatccctagtgtttattgttcccgtctttgtgttcatgtgtacccaacgtttagcttccacttataagaatatgcagtatttggttttctgttcctgtgttaattcgcttagggtagtggcctccagctgcattcatgttgctgcaaaggacatgatttcattcttttttatggctgcatagtattccatggtgcatatgtaccacattttctttatacaattcatcattgatggacacctgggttgattctatgtctttgctattatgaatagtgctgtgataaatatacaagtgcaggtgtctttttggtggaataatttgttttcctttgggtatatacctagtaatgggattgctgggtcaaatggcaattctatttttagttctttgagaaatctctaaccttcttttcacagggctgaataaatttgcattcccaccaacagtgtgtaagcattctcttgtatgcacaatcttgccagcatctgttattttctgacttcttaatagccattctgactggtataagatggtatctcattgtggttttaacattcatctctctgatgaccagtgatgatgagcattttttcaaaagtgtattggccacttgtatgtcttctcttgagaagtgtctatttatgtctttgacccactttttgtgtgtttactctgtcactggttttttttgctgtgcagaagctctttagtttaattaggtcccaattgtcactttttgttttaactgcatttgcttttgaggacttagtcataaattctttcctgaggccaatgtctggaagggtatttcctaggtttcttttatgacttttatagtttgagggtcttacagttatgtgtttattctaccttgagttaatttttgtatattgtgagaggtaggggtgtagtttcatacttctacatatggttagccagttttccaaccaccatttattaaataggaagtccttttcccattgtttatttttgtcagctttgtcaaagatcagttggctgtaagtgtatggctttatttcagggtctctattctgttccattgatctatgtatctatttctgtaccagtaccatgctgttttagttatcatagctttgtggtttaaagttaggttatgtgatgcctctggctttatcctttttgcttaggattgccttggctatttgggctcttttttggtctgtatgaattttagagtagatttttttctaattctttgatttctttgggcaatacgacgcattcaaaaaagacttggaaggaaataaataaaaataaaagtgatatctaattagtagaatcttaaacatctttttttacttcattttataagtgatatttaagaaacttttagtactcttaaaatagaaaataatattgaaatgatcccgagggagtgtcagatctcttccttaccacctaaatcttactgctttctttaaaggatatactcatagggacttttggaaatatttaaatataagctacagagaaatgttgggtttctccactgccagactttgaggcattcactagctaatggacttttgagcccaggaggcagagagaacatgaacattctccagacttctgggaagctttatttactgaagcccctgtaggcctcgtactctctggaacatgcattggaaaatgctggtgtggtggaaagagaacaaaacgttgtggctacctgggctctgatggatgttgtaacaaagaaaggcaagctccccaaatgctcaaattgaactttcagtcaagctttatctgtctctcaagcagcaaacaatgccagttttttattctgcaagccattttagaagacaaaatgtttggcacagttgcacaggttagcatgctagtgtactgtgtacacaagatgaaatgtcttcaatttgtgttaaaatatgctttacccccttctcaaacacttgtcaaatgaaacgtagtaaaagtttttgtttctcaactacctcactgtgtaagtaaggccttagagaaaacaagctgacagaagcaagcctggttctttggctctatgggaagaatgactttcgtatcaacaatgttagaataaaatctgatcccagataaatgctgcttgctgcttctacctcaccagtttctgtcgtatgctgctgtggttggaacattttctggcaggaagaaatcaggggctctgttaggaaacaacagaattttctgccatgtgtaattcctgagcctctttctccactctgggaggtttctcaagggtccagtggccccagaccttagtcagtgttcctctctgcccacaatggccaccacctaagccatttcttggattcctttcactgcaagcctagctgcagaggagtctgtccagcttgcttccttgctgtgcccaaagccagcatacaggcccttttctttctaaaggcataatgctaattactggagggaatccccactgtgtgtaactaggaagagaacactgtggaggttatggcaggtcaagggtccttgcaaggtctgcacggtggtactccctggtctagtgaaatggagtagagtttgacactcaataggctctacttttagcttttcctagtggtccagggaggtctcttaaatcctatttcttgtcttcttttctccctggagtctcttagattcatagcagatgatatatatacccattgccacctacattttcaggtcttcactggggcccctacattggtgtctccatgaaccaaacaaggtcatttctactgttcctctttccagaccactgcttctgttcatgcaacctagcttatatatgtagggagattcacacacacacacacacacacacacaccacacacccacacacacccacacacacagctaaattaagcatttttaaagtggcagaccatactttgaggtctgcagcttaaataagcagccacgtgacaagcgtctccttcttctcttcctttcgcttccccatttacttccctctatgtttcttctctaaggaagatttaaaagcacatgtgccatcatgctcttctcccaagttcatatcagatgtcattaatcaatcatggaattttttaatcctgagtaagcccagagatataaccaaagatgactatcagttgatcaaaatgggcattgagcagtttactcctggatagatacccccaaagaaatgagagcttatttcaacaaaatgaaatgcatatgaatgtttctggcagctatatttccagtagccccaaactggaaataacccgaatgtccatcaacagttgaatggataaaaatatagtatatccatataatgaaatactttgcagtgatggaaaaagatgaactactgatacacacagtttgagttcatcttacatagtgtaaagtgaaagaagttagacataaaggaggcatactatgtgagttcatacattgcagttcaaaaacaggcagaactcatacatggtggtagaagttaagacagtggtaactgactgagaggggcactgggaagccttatgagggctagaatgtgttctgtatcttgatctgggtggtggttatatggatgtgcacatatgcaaaaatttattgaggtgtatgcctagtatttgcacactttactgtagctacccctcatttaatgtccttaaaagggggcaccaatttgaaaattattgcccagcccttgcttctatgtttctgtgtatagtttctgtttctagttctttctcctgctgtcatctgtccttcttctcctctgctgactttctttcctcctttttttcttcttttcatctccccctactcgtaaagctaaaaacatgaagtttaagtacatatattgtaaaatatattaaatacaattttacagttatattcataatttaaaagtgagtgtatttagtgtttttacacctctccttaaaacaaactctgcatttattgaactaaaattagatgaacatatttattacgtcttactggcattcaatggagtaactcagtggttcccaaacttatctgcacattagaatcatgtgggaccttataaaaattccaaagcccaggacacaataccacatcaattagatcacaatacctgggtctaggacacaagcatcagtagccattgaagctttccaggtgattcccgtatgattccaatgtgtagacaagtttggggactatagattaatggctttctattccttccatagtgtctcagctacttcagcatgtggttctgaatcttggctgcacattagaatcacctaagaagcttctaaacaatactgcttcttgggccctgttctgcataaggtctgaatatttctaacatgcaaacagcatgaagagccccgttctagcagggttgttgtcctggtagatcttgtgatcggagtgactccagtgccatcccctcaatgttcctctcaaatactttctcctcatgtttttgaaaattccagtcctttcttttgcaagcctaatatggagatgagtgatgtgatactgataagtttttggtctgtgttgctttcagtatgggattgtgctggatgcgggttcttctcacacaagtttatacatctataagtggccagcagaaaaggagaatgacacaggcgtggtgcatcaagtagaagaatgcagggttaaaggtaagatgaagaccaagggaaggggaggccaacagtggggcatgagaacatgagaggtgtatgaccagtagaacacaagagaaaaaggagtcccacgcataggaagccaagtgaagaaaacagtgcagctgctgttgttatgttatcgttacagaaaacatattgaaatcagtcgttaatgatcaaaacctaagaataaacacacataaatataattaatagtagctcccatcaacagaacacttctgcatgctatgtacttagtactgaacatgtgttacttcagtataccctcataatctccctttgaggtatgcattattatactaattttttaaaaatgagggcactgaggttgagagaggttataccacttgtttgttactcaagctagtaagtgatggagctgcggttcaaaccaagttctgcccgacttcaagtctgcatcttagccagtgcttctcaaacttgcatgagcttgttaaaaacacagatgatgggtcccatcccctagagtttctgagtcagcagatctggaatgaagcctgataatctgtatttctaagaagttcctaggtgatgctaatctgtctggttcagagatttattgctctcttaatctttgtaccctgatctacagcttggaagacatttttcaaagctttcagcttctgtgtaggcaggaaagaccaaattataggctcttagggctgggaaaaggaacttacagatcgtttaaattttgtttcacagagaaggaaacaaaaacctggaggattagtgccttgaaagtagcaacagaatagagacaagaatctaggtctcctaattacactctaggtttcctgctactctgagctgctgcattatatatcaataatttttttcttttaaggtcataatatgttagagtggttgacattcagctttcaatccctttacccagtaccctaccatgcaccattataccacagtctctctgacttttatctctcttagccttttgagctgggaacccactgtttatttttagtcagactgatagcctagatcctagaagataattgattttcagtttgacagcctgtggaatccactaattttcacaggtcgtcaagaaagtagtagagaggagatatttccaagagagcaagtcattctacccagtagccccatcaatactgacactttggccccatctgagacagtacttctggcctttcttaaagcccaaatccctcattttattggcttttatttgacacactgccttccatttttaaaagttattttaatggccaagcacggtggctcatgcctgtaatcccagcactttgggaggctgaggtgggcggatcacaaggtcaggagatggagaccatcctggctaacacggtgaaaccctgtatctactaaaaatacaaaaaaattagctaggcatggtggtgcgtgcctgtagtcccagctactagggtggctgaggcaggagaatcacttgaacccgggaggcggaggttgcagttagccgagatcgcgccactacactccagcctgggcgacagagcaagactccgtctcaaaaaaaaaaatctagcagatgtccttcttctgagacttatcccatgagcgtttggcctaacaatgaaggattcttccctctcaaaagagagagttctctagttaatcaaatatttaacaccaaattttctgaatcaaaacaattagctggtaacttagagctgattttctcatggttattaggctgtttgaaaacctgtgaatgatctggataacttatttgaataattatccttaaagcaattactctgctatgaagcactgatagtgtagatatttatcttaatgtgagatgaaagtgttgttataacttcaaaaagcttaaggaatcttggctctaatcctccatagcaacagtcggttttgctctaaaactggaaaaacagttttgctagggaggcaggatatcggagtggaaaagtcactgaagagacatagattctgttcctctttcttgtaacaggaagcaactccacctcagaaactttaaggtgctggccaggatcagataactagttagtggcagcttccatctttttagtaaaagccaatttgtctgacgcttaatttttattccaagtgttatctttaggtcttttaggaactagtgtcattaattacagtgttctggaggaaatatcaaaaagcagctaacagagtagctatctataatatccccattaaagtctgagaatgttatgcaattgaatatgaaattgcgccatccagtggcagaattattgaacactgaacagacccaacttaaagtctggaaattaaatcctctcaaggctaggtccagtgaattaccctctaagtacaataacctaatgtatagtacatcaggaaattgttttcttgtatttttttcaaaacaccatattttgatctactattgtcaaggtatgttttataatttttttttaaaagattgttatcttctacattttttcctaggtcctggaatctcaaaatttgttcagaaagtaaatgaaataggcatttacctgactgattgcatggaaagagctagggaagtgattccaaggtcccagcaccaagagacacccgtttacctgggagccacggcaggcatgcggttgctcaggtatagcagcatgtagggaccaagagtatctgggagttaggcttggcagtgaaagagcctctgaagttatgggaaagggccacactccctaataccccaagttctacacacccaagtccatacttaagaaaggatattttagtaagtgaataaaatgttcaaactcttagtatatataggggtaggattttatgtatgttaaaaaaaaaagcccccttgtgcatctccctatgggggattcaaaggggaaggggcacagggagagaaagactgggcccgtatactctggggtttggggctacagatttaactattcaatatctgggaggaagaggataagaggagactcatagacatcccaggtcataaatattcacaactagcacatctttatatcacttgatacctgtgtgaattatttgttcacttgttcattcattcagcatatagtgcctgctctatccagaatatgaaaactcaaccctcaaggaaatcagtttcaatgcagggtgatcagtgttttaatagaggagtgctcagagctgctatgggagcacatttggccctgcccagggtgagaggaggtcaggaagacttagaggaagggatgcctgaactgaatcatgaaaaatgagttggaggatcggggaacagctttatcagcagaacagacagcatgcattcagtaactgatgtttattcagcacctattatatgtcaggcactgttctaagtactgaggatacaacagtgaacaggacaaagtctctgacttcatggagcttgtgttctaccggatgtgcaaaggtagggaagtgtgagaggcatattcagaggactgtaagtagttctgcatagatagaagataggtaagtagtgtaaaataataatgataataatagtagcagctcgtatttattgagcccgtcctatgttcttagcactacgctaagcacttaattgcactgtcataacaactctatgaaattaacaattattaacaagataaggaagctgtggcttacaaatgttaagtaactcacccaaggtcacacacctgggaagtggtggagccaggattctgagtgggattctgaaaaggaagggtccaggtcacaaagtgccctatggggccatgctaggaagtttggagtttatcttagagatagtaggaagccattaaaggatgctacacaactggtgacactggtagagaagatggattggaggggagaaaagctggggataaaaggaaggcagttagtaggtgtggacgccatttagatgagagatgacaggggcctaatgccagctggaaggtagcatcctctcgctcagagactcccagtgttgggtagcctagatcttggaagcaattgcatcccatcttcattaagacaaccctggaagattccttctttaggtctcaaggtctcaaacagacccaagaactgagctgtaatatgaggaagatttttcccagtctggcagcagaggagattggatatctattccaggtcatttgccacctggtttctactagaaccctaattaaaaacctggagcagagtctggccatgtaaccagctaggagccacccacagtggttaatatagcacacatcagcttcaggtatggtcatcaaaccatacccagctatcaccaccacagtaattttaagagcctttgataactttttgagccagggaacttcagaacaaaagtggtattttaaggaaaaccaacctatgaaaggattggaaggatgtggatttggagagagatgaacaaaatattaattctgcctcatccaaaaaaggggtttcttggacagctatgtgcgaagatccccatctcttcatttattccagggcattatggttcacttcttagtagcactgtgtggatgctgtagctgaaatgggtaatgtaatataattattaaaacaaaaatgataacctcagctcttcctttgtacaggatggaaagtgaagagttggcagacagggttctggatgtggtggagaggagcctcagcaactacccctttgacttccagggtgccaggatcattactggccaagaggaaggtgcctatggctggattactatcaactatctgctgggcaaattcagtcaggtgaatatctcacagcatccatggaggtggctctctggaggccaatgccattgctatctcaggcagtacttgggtcgctagccagaatgaatgaatgaatgatagatggatggatggatggatgactggatgaatgaatttactctcacatttgtaagggtcaccagaggtataattctcttacaagaccttctactattgggagaataaggacatgtctttaccttagggaggcataaaggaaattaaaaatttatcattaaaaattagaatagctaacatttgccttctgctatgtgtctcccgctgtgctcagcacttttcatgttttctctgattttatccttagaacaacactatgaggtactacatcatccccattttagagccccatatcgatgcctagagagggtaattagtctgcccatggctgtacagctaacaagcgactgagtgagaatttgaacttgaatgtgtctggcctcagacctcttgtttttaaacaccagttacactgcttctatgtccggcagtctgagctatgtctttgaagcccctcttttcttgctgataatctgttgtagatcaggagcctctagtgagctttgcctcacctttatgcccctgtttctttgccttaggaaatccctgactccaatagatactatgaaaagcagggtgtccagagacttctagcactggtaactgtactgtctttcagaaaacaaggtggttcagcatagtcccatatgaaaccaataatcaggaaacctttggagctttggaccttgggggagcctctacacaagtcacttttgtaccccaaaaccagactatcgagtccccagataatgctctgcaatttcgcctctatggcaaggactacaatgtctacacacatagcttcttgtgctatgggaaggatcaggcactctggcagaaactggccaaggacattcaggcaagtataactcaatccagacctgcccccttcacatctgcacctccagcccccacatcctgttgttttctgtttcaaattcagtagtttgtctgaacttggttattgtactttccaaacctttttaggcaggatattgaactacatctggttgacccctataaattgtttcagtcagacatcccctcccatgtttgtttactgcgttatctccacagacacaactgagatcttctctcaggaaataatttctccccctcgtggggttgataatgaaaattatgtggtagaatattgtttgttggagggggaattgcaatttataagctcttttagaccactttttaaagctccctttcctacaaactacaaaaaaacagagttgttagaaatgacctggagaggagaaggaaaaaaaaaaaaacacttcaggagaaacacaaaatgtatcaattgacacttcaaatcttgtcatcttgtccccagatgccttctgcattttgaagacaagaaaagttaaacacactttgggaggctgaggtgggtggatcacttgaggtcaggagttggagaccagcctggccaacatggtgaaaccccatctctactaaaaatacaaaaaaagaaaaaaaattagctgggcatggtggcacatacctgtaatcccagctacttgggaggctgagaaaggagaatcacttgaactgggaggtggaggttgcagtgagccgagattgtgccactacactccagcctgggccacagagcgagactccatctcaaaaagaaaaaaaagaaaagaaaaagaaaaagaaaacaaaagttaaacatactcaacatcatgtgagtaccaggcacaccctgacaagcaaacacaaagccaggatgtcatatccagctgttccctgtctccactgaaaggataacaagttctctgctctcctccaaagcattctctctggttttcaaaaccactaccaataagatggtcctgggagtagggggcgctgagagacatccactgagcctcaaagctccactaaccttcttatccacagcagcctcctttcttccctagtaggttgtgggttagaaattacttttttttgggccaggcgtggtggctcacacctgtaatcccagcactttgggaggccgaggcgggtggatcacttgaggtccggagttcgagaccagcctgaccaacatggcgacaccccgtctctactaaaaatacaaaaaattagccgggtgtggtggcacacacctgtaattccagctactaaggagtctgaggcaggagaatcgcttgaacctgggaggctgaggttgcagtgagctgagattgcgccattttactccagcctgggcgacagagcaagactccatctcaaaaaaaaaaattatttttcttggataggagaatgcttgaagaagaaaaaaaatttttttaataatttttaaattatgtaggctcctggagaactactcccaggcccaaatttttgacaaccttgagagtttccttgtgaatttgctcctgacctagatgattaggactaagcactcagggacatttcaaactaatggcatttctgggcccagttttaactacatcagcattctttgactagccaaatacatttatatctgataccacttctggtgcctgttacacaaatccatttttcatatttattcctaagggtaaaaaggcagggcaggacatattgattccaataccaagtggtgggatgttgtacagtgcctacatattgattaagtcagactgtaccttttgtatccaaagcgttcacacatgatgctttcaagtgatttttccattcaggttgcaagtaatgaaattctcagggacccatgctttcatcctggatataagaaggtagtgaacgtaagtgacctttacaagaccccctgcaccaagagatttgagatgactcttccattccagcagtttgaaatccagggtattggaaactatcaacaatgccatcaaagcatcctggagctcttcaacaccagttactgcccttactcccagtgtgccttcaatgggattttcttgccaccactccagggggattttggggtaagtttgtgaaatgatgaggtataggatgtcttgtttacaagttatagaatatgtgcctacaaaagatttaaataataggatgcatttttctcttacataatgtcttgaggtagatgattaggggttggttcttcagctcaactatgtcagaacttgggatcagttttttccactatcgttgtgatctttttgtgctaaggtatgttactgctccaagcaccatatcactaggtcactgcctcctttttggctctaggcagcaccttaagcccaggttcatctcctttctagtcaacaataagagtactgcctttccggaatgggggaggtcccaaagaggttagccccagcagtgtgggaaaactgactagggggttgtgcccaggggaccttgtgggacagacctcctacagccatagaacagccactctgatttggcatctcctttggccaagtgacagagcagacttcccagggctggggatgctaaatctgcctcttccttgtctctgcctgtccccagggatatctcccttcaggatgtcacgatgcttactgtgggttaagacaaagacaggtttcctgctagggaacccaggatgatggggaagctgattgtccaccttgatctcactttttccagtgtacaaattgtgagtttgggggaaattttccacaagcttggtgtcaggcagaatcgggggagaggtgacatggatgtggaagtttgattatcttcccgtctgcttggagttttttcacttctttgtggccccaggaactgtctcatcttcatatttgatttctgggatattgctggtgataatctcagtgctgtacatttgtttctggttgtctgtggttggggggcatgaagccagcttgcttccatgccgccattttggaatcagacatccaagcatcatattttctttcacatgcaaagccaaagcaggaaagatgtttaaggttttccttgcacacatctcttgcacacacattttgcagaagtgccaactgacatcttttcagatcctgctggccagaacttggtgaaatatatactctaaaccaatctgtgataaagagaaatggattaatatagttagtttagactaattattgtttatcacctgaggagtcgtttttgaggatattgctttcctctacttgggtaaaatcaggacttcataagcgaggaagaagggggctagctatggggtatgtgcctgttagagtttgccataggtggcttctcaaatgttagaaggaggaggagcagcagttagatgacacagctgagggttttcctctataaagacatttaggaagtagaaactcaggaaatcccaaagaaacattgaagataacatcattgtcattatgttttgaagagttgggggattatttgaatcctagctccaaattccttattttcttaataactccagaataagataaaatatttgagcagaggcagaagagatggctcttaattgactcagtcttcaaatttcttattttggtcccagaggctgagcattattataatcatagtttagtagcatattgaaaaattagctaccatctgtcaaatgccaattattgactatgcactatatgtatattatctcatttattcattcaagatattcaaagaaacaaggcttttgcctgccttcatgctttctcccttttcagaaaacagatcagcatgtaagaagggaggttcagctcctcccctccaggaccccagcaagagagtttctcctaaggtcacctggcttggcccaagacaaagctctagaagagaacataggcactgtcgtaatcagatctgattctacttctggcttcttatgaactgtatgagctcttcattttcttggtctctgagaaaacaataggtaatgccatagatccagacttaccttaaccatggtccaaaccacagtctaccctcccctcaaggttcctgagggaaatacatgacaagacaatgactggcagagtaatatttggttattagttggctgcaaacccaaattcagaagaaactgaacctcacttgaatgccctgtggctgagctggcactggctcttcaccttggacttttttttgggccagggcccttgccttagattgaactccttgaagaggaaggagggtgccaccttggccaagggcctttttcattccagtcactgcgaggatgtaaatctaaagtcaatgaacatacccttgtgtcttgagtttgtaacttctcagaaagtttcacttcctgggaaacatggccaattcctgccttcaagcttgagcaaacctttcctccttaggggactgaaatttcttgcctttgaatgtgattcatccaaccaaagcagggagagataggggctggaaaagggtggaggagtcttgaactccccctggaggcttttctatttgatcccttagttcctcattgagattgttctcccagccttctgaacctcagtttggcagttcctgagactatcgcattgcctgcctctatgtaggatctttctcctctagatacagccctcagggtcaggactgtcctgtcccgatttctgcattggcagtttcattctgcttcagatttttgatgttttttgttttgttttgttttatgccctctgtaatgtatccctaagacctaaagtttttttgtctgtttcctcatctgtacaatggggacagtaatatctacctcattgatagttgtgagtcagacaagcagtgatggtctgggaaatgtccaacaaccaactctcggggaatggggagctgatttgtagcacttaccagtttccatggtgtaagtagttctaccacagcctatttcaagctatatcaacatatcaactggctcacaaaaatctggaaattttaagaatcagctcttgtgagtacataagaaagagtcagctccagcacaccactgtaaatagcaaaaagcgggcataccccagcaccacccttaaaaaggttaggtctttatcctagcagtcttcattctatgctgtccttcctgcagggagttcctgttatcgagtcctgcctcttgaagcatagctatgtgcaacacagaaatccagtttcattcccattctttccagaactagttagcctgggtgttctcaagccacagagaatttgttggggagggagtttttgccacagttgcattcagcactgatgatctgattcttagttggtaaatatggtattaaaaattgtcattgctttagtcagtctggctacactgtagccttggttgctaaacagaatccaatgttgtgggcaaattagaaacactaacaagaaagagggaacatctgtagggaattacttatgaggtaatttagaaattatttttaaagatcacattgtgctgtttatataaataagaaagggaagaaacaagttcaataggaaactggaattaaagaacattaaaaacacatttgtttacatatgtatacataaatgtgtgtatatttatatttatatttatttatatttatatttttgttggtacaaaagtaattgtggtttcagaccatgaattttatttttttaattttttttgaaaagtactaaatatataaatattcacaagttcaacaaaggagagaaaataacaccaataaaatccccaaaaacttaacaatacattaatctaggttggatgatcttttttttttaattatactttaagttctagggtacatgtacacaacatgcaggtttgttagatatgtatacatacgccatgttggtgtgctgcacccattaactcgtcatttacattaggtatatctcctaatgctatccctcccccctccccccaccccacgacagtccccggtgtgtgatgttccccttcctgtgtccatgtgttctcattgttcaattcccacctatgagtgagaacatgcagtgtttgtttttttgtccctgcgatagtttgctgagaatgatggtttccagctccatccatgtccctgcaaaggacatgaactcatcattttttatggctgcatagtattccatggtgtatatgtgccacattttcttaatccagtctatcattgattgacatttgggttggttccaagtctttgctattgtgaatagtgccgcagtaaacatacgtgtgcatgtgtctttatagcagcatgatttataatcctttgggtatatacccagtaatgggatggctgggtcaaatggtatttctagttctagatccttgaggaatcgccacactgtcttccataatggttgaactagtttacagtcccaccaacagtgtaaaagtgttcctatttctccacatcctctccagcacctgtcgtttcctgactttttaatgattgccattctaactggtgtgagatggtatctcattgtggttttgatttgcatttctctgatggccagtgatgatgagcattttttcatgtatctgttggctgcaaaaatgtcttcttttgagaagtgtctattcaggtccttcgcccactttgtgatggggttgtttgtttttttcttgtaaatttgtttgagttcattttagattctggatattagccctttgtcagatgattaggttgcaaaaattttctcccattctgtaggttgcctgttcactctgatggtagtttcttttgctgtgcagaagctctttagtttaattagatcccatttgtcaattttggcttttgttgccattgcttttggtgtattagacatgaagtctttgcccatgcccatgtcctgaatagtattgcctaggttttcttctagggtttttatggttttgggtctaacatgtaagtctttaatccatcttgaattaatttttgtctaaggtgtaaggaagggatccagtttcagctttctacgtatggctagccagttttcccagcaccatttattaaatagggaatcctttccccattgtttgtttttgtcaggtttgtcaaagatcggatagttgtagatatgtggcattatttctgagggctctgttctgttccattggtctgtatctctgttttggtaccagtatcatgctgttttggttactgtagccttgtagtatagtttgaagtcaggtagcgtgatgccttcagctttgttcttttggcttaggattgacttggcaatgcaggctcttttttggttccatatgaactttaaagtatttttttccaattctgtgaagaaagttattggtagcttgatggggatggcattgaatctataaattaccttgggcagtatggccattttcatgacattgattcttcctacccatgagcatgaaatgttcttccatttgtttgtatcctcttttatttcattgagcagtggtttgtagttctccttgaagaggtccttcacatcccttgtaagttggactcccaggtattttattctctttgaagcaattgtgaatgggagttcactcataatttggctctctgtttgtctgttattggtgtataagaacgcttgtggtttttgcacattgattttgtatcctgagactttgctgaagttgtttatcagcttaaggagattttgggctgagatgatggggttttctagacatacaatcatgtcatctgcaaacagggacaatttgacttcctcttttcctaattgaatgccctttatttccttctcctgcctgattgccctggccagaacttccaacactatgttgaataggagtggtgagagagggtagccctgtcttgtgccagttttcaaagggaatgcttccagtttttgcccattcagtatgatattggctgtgggtttgtcatagatagctcttattattttgagatatgtcccatcattacctaatttattgagagtttttagcatgaagagttgttgaattttgtcaaaggccttttctgcatctattgagataatcatgtggcttttgtctttggttctgtttatatgctggattacgtttattgattttcgtatgttgatccagccttccatcccagggatgaagcccacttcatcatggtggataagctttttgatgtgctgctggattcggtttgccagtattttattgaggatttttgcatcaatgttcatcaaggatattggtctaaaattctctttttttgttgtgtctctgccaagctttggtatcaggatgatgctggcctcataaaatgagttagggcagattccctctttttctattgattggaatagtttcagaaggaatggtaccagcttctccttgtatctctggtagaattcggctgtgaatccatctggtcctggactttttttggttggtaagctattaattattgcctcaatttcagagcctgttattggtctattcagagattcaacttcttcctcgtttagtcttgggagggtgtgtgtgtcgaggaatttatctatttcttctagattttctagtttatttgcatagaggtgtttatagtattctctgatggtagtttgtatttctgtgggatcggtggtgatatcccctttaccattttttattgcatctgtttgattcttccctgttttcttctttattagtcttgctagcagtctatcaattttgttgatcttttcaaaaaaccagctcctggattcactgatttgttgaagggctttttgtgtctctatttccttcagttctgctgtgatcttagttatttcttgccttctgctagcttttgaatatgtttgctcttgcttctctagttcttttaattgtgatgttaggttgtcaattttagatctttcctgctttctcttgtgggcatttagtgccataaatttccctctacatactgctttgaatgtgtcccagagattctggtatgttgtgtctttgttctcgttggtttcaaagaacatctttatttctgccttcatttcgttacgtacccagtagtcattcaggagcaggttgttcagtttccatgtagttgagcagttttgtgtgagtttcttaatcctgagttctagtttgattgcactgtggtctgagagacagtttgttataatttctgttcttttacatttgctgaggagtgctttacttccaactatgtggtcaattttggaataagtgtggtgtggcgctgaaaagaatgtatattctgttgattaggggtggagagttctgtagatgtctatctattaggtccacttggtgcagagctgagttcaattcctggatatccttgttaactttctgtctcattgatctgtctaatgttgacagtggggtgttaaagtctcccattattattgtgtgggagtctaagtctctttgtgggtcactaaggacttgctttatgaatttgggtgctcctgtattgggtgcatatatatttaggatagttagctcttcttgttgaattgatccctttaccattatgtaatggccttctttgtctcttttgatctttgttggtttaaagtctgttttatctgagactaggattgcaacccctgcctttttttgttttctatttgcttgatagatcttcctccatccctttatttaagcctatgtgtgtctctgcacacgagatgggtttcctgaatacagcacactgatgggtcttgactctttatccaatttgccagtctgtgtcttttaattggagcatttagcccatttacatttaaggttaatattgttatgtgtgaatttgatcctgtcattatgatgttagctggttattttgctcgttagttgatgcagtttcttcctagccttgatggtctttacaatttggcatgtttttgcagtggctggtaccagttgttcctttccatgtttagtgcttccttcaggagctcttttagggcaggcctggtggtgacagaatctctcagtgtttgcttgtctgtaaagtattttatttctccttcacttatgaagcttaggttggctggacatgaaattctgggttgaaaattcttttctttaagaatgttgaatattggctaccactctcttctggcttatagagtttctgccaaaaggtctgctgttagtctgatgggcttccctttgtgggtaacccgacctttctctctggctgcccttaacattttttccttcatttcaactttggtgaatctgataattatgtgtcttggagttgctcttctcgaggagtatctttgtggcgttctctgtatttccttaatttgaatgttggcttgccttgctagattggggaagttctcctggataatatcccgcagagtgttttccaacttggttccattctccccgtcactttcaggtacaccaatcagacgtagatttggtcttttcacataatcccatatttctgggaggctttgtccgtttctctttattcttttttctctaaacttcccttctcacttcaattcattcatttcgctagaccattcttaaaagaagatatacaaatggccaacaaacatgaaaaaatgctcaacatcactaattatcagggaaatgcaaattaaaaccacagtgagacactaccttactctcctgcaagaatggtcataatttaaaaatcaaaaaataatagatgttggcatggatgtggtgtaaagggaacacttttgcactgctggtgggaatgtaaaccagtacaaccactatggaaaacagtatagagactccttaaggaactaaaagtagaactactgtttgatccagcaatcccactactggatatctacccagaggaaaataagtcattgtatgaaaaagacacttgcacacacatgttcacagcaacacaattcgcagttgcaaaaatatggaaccagtccaaatgcccatcaatcaacaagtggacaaagaaaatgtggtaaatatatatatgtatgcatatatatatatatatatatacacacacataaatgtatatacacacactatggaatactactcagccataaaaaggaatgaaatcatggcatttgcagcaaggacacatgatgtattaagtaaaacaaagcagtattataaaaaatttgtctagtatcatcatatttaggttatatatatacatatacacatatataattatataaatatgtattcactattttctattacatatctatttgctatagatattaaacagtaaattgttaaaaagtgtacatctctagaggatggttagattaaggagggacttccatttttaacttgtattatttaaattctatataataaacgtgtttttttttaataagccagcattttaaagacatttctattttgaaggaaaagaaatgaatagggaaacttcatgttttgagaaataaataagagcaagattctgagatgccagagggaggcttctgaaggtcatgggaaatttttcaagagccgatggcatgtagtgtcttggggggttggaggtggcatggaccaggaggccctgctgacttgatcgctatgtatcctactgaaggctcaatatgttgctaaatctacctcatagaaatttgttgtttgttgatctgttttttataatttgtacttactttataaagcaaatgtcactacttagcaaaagcaagagagtttctagatgcttacctcattgagacttttgctaatagaataagctctaggattaatttcagaaagtcttttgaaatgtaacaatttaaggaaatatttattagtgctttattacatgctcattataaaaaaactgtacaaaaagcttaaagtaaagactaaaaggtctcttctccctctcaccccaccatcagttcactagaggaaaaatgaggaatagttgtaataaacaggaagaacttttccaggcattagctatgcgaatccaagcatatataaatttatccagatttaacagagattgttgtgccttaggaactagagagagagcagttttctgccacttatttacggagcactcacatatgccaagtgccatgttagtgagggcagattcaaccaagaacaagggaaattccgcgcctgccatcacagagttggcattctagaaagcaggcagacatgagaccagaaacacaaacaaaggcaaatccgactgctgcaaatcaaaaggaactgctggggcaggtcgcggtggcttacgcctgtaatcccagcactttgggaggccgacgcgggcggatcacgaggttaggagattgagaccatcctggctaatgcggtgaaaccccgtctctactaaaaatacaaattagccgggcgtggtggcaggcgcctgtaatcccagctactcgggaggctgaggcaggagaatggcgtgaacccggacgcagagcttgcagtgagccgagatcgcgccactgcactccagcctgggcgacagagcaagactccatctcaaaaaaaaaaaaaaaagtaactgctgggaggaaagagacagtcctgtgaaagcagataacagagggtcctagagacccctctaaggaggggaagtggaagtccagggaattccagcagagggaatagcaagtgtacaggttctaggggaggaaaggcttggcggggattgaaagccagggtgctgggtatggtgggcatgggggcagggctagaacatgcctggttttcagcgaccttgtaggatttgatttttattctaagtataattaggagccaccaaaggttttaagcaggggagtgatatgatcagatttgtttttaaaagattcctgtgactgctgtttgtaggatgggttggactagaaccagaaagctaatgtggagactaattaagaggccattgcagtatccacacgagatgatagtggcttgggttaagagggcagaaataggaccataccacgatctttttctgcacctgggatacaatgataatggaagtgctggaattcctgagttcagggcatatggaggctctccagtttctgcagagctcgacttcctagaggaatgagcataccagttcagaggctaaatgtatttataccattgctcataggggaaattgctggaaatcaggagaatatctaccagtagagagttgttgaataaattaagatacatctacaccgtagactcttatgtggccattagagtggccccagctgacttggagggatttctataaaggattgttaagaaaagcaagatgaagaatctgtttaaaatttcatttctaaaacaaaccctttatatgtgtgtgtttgtatatgattataggagcatgggaaaaatggaaggcttcatattaagttgttagtatgaactcctgttgggactgaaagtggaagaaaaaaatcaagccaaaaaaaggaaaatttattaaaaaggactaatatgctcacacttatgttattagatatatatgtataagaatattgaaaaatgcaacttttaagaagctggcactgggtttatgtcaattggaactgaggcatacggcctgtttgcagcaggaaattgcctggtggaggatatttttcctcatctctgagtcacagtgagcccccaatgggatctctgctacctcctgtttctttgcctaccaaaactctgtttctttgcctatgcgaattacactttgggaatcacatttgctttctacattcacttctagttaagtaattttacagaaggcaaattataatccccaatctaaccgtgtttgccacagggaaaactttatgcccccctcaaataatctcagtaaactatgactcagcacagtgtctagcaaacagagctcagtgtgtttgctgaatgaacaaatgatgtgctcctttaatatccaacatgatttccccctaaaaactggcacctttttgggtaggaaagaggaaaagcactggagttggggtttgaattgcctcatctagcaagctctgctcaattattttttcccctttaaattatgctctattaaaagagtaaaaaggcagttatagggtggtatgaagtataataaacattttatatgtatcatagaatgagaaagatgctagaagcctatatactatattgaatagcagttgtcactaagtagtagaatttagaggtcattttaatagaatttttttttgttttactgatttgaacttttaactttttttatagttcttatgtttgatgatgataatgatttttaaaaaatttcagttgtgtctaaaatagtacctagcccatagtagacctgtaataaatatttgttgaataaagatggattttttaaaggaaagcagtacatattcattatagaaaataggcaaaaaataagcacaaggggaaaaaaccaatttcgctactcagagataactcaatagtgttgtatagaattttccagttgtttatatttattaaacattcatatgtagtacatagtatttttaaatgggatttttgcaacccctttctctctcttttcttattctctttccccatttttctttctccctgactcttctattacaattatggagaaaagtaactgccaggtggcttagaaatgtgtgtcagcagcaaagtggctcctcttccaggaaggaaacagctcttgggcctgcaatatcactttgtgtgttaatttactcagcagaactttccaggcacctgcacaagggatgcggcctttaggagagcaagttggcatccctctgtgtggaacacagcctaaaactgcgattttctcttgtaggcattttcagctttttactttgtgatgaagtttttaaacttgacatcagagaaagtctctcaggaaaaggtgactgagatgatgaaaaagttctgtgctcagccttgggaggaggtaagtgactaggcacagcagctctaacagcatgagtgccctgtgtcgttgctgatgcagaggatgtgagtctgctctgaaactcctgctggtttgaccaagatccagcaaatgtgttagagaagaccagatggtggactcaggaatgaatttatcagcattccttgataacttgacatccagtggcttaaataagatcttatttttttctcacctaatacaaagtctggcagtaggcagctgctggcatggggtcagcagctctgctctatctcagccattgcttcttcagctctgctgttgtgcctgtttcttcatggacacaagatggtggctgtggcttcaggcatcacagccatgttcagaaaggtcagaaaaggggtcgaaccagatacatctgttcctttttacaggaaagcaaaagctatcccagactcagcagtcttccccttatatctcaatggccaggattgactgggaaaaccaggtgcagaattttgtgaccagcttagagcttagacctataatgagccactgcctcgagctgggcacattgtggcccactctcctccttcagtccccaaatcagagttctgttagcaagaaagcaggcaatttgcagagtctgacacagacacaattgtggtaaaatcctctccatttcccaggtccaagatatctcctacttattcataaacttgaagcacaatttttttcttatcagaggcactgagccattcaacatccagtgccacaagatgaaaatccagggatgagaggtatggaatccactccgattataaaagacatagctcaaaacagcagctgtacttaagttgacagttgcaaaagtgaatggtgttttcattcttaagaaatactattaattaaaaatagatgcttatccctgactgcactgacaagggggaagaaaggctgagcaagagcctggaagcttgccattctctccaggtattttgtctagaacatgaaagaaatgtggtcagggccttcatcaagagttgctcaaatatgtctcagcattttacaaaatgcttagcggtggttttttgcatctggcggtgatctgtggaggaagataagcatgttagagtggaggcaatttgagaccaggcctacatgtggctgctgaggaagcagatttaggctgctctttgaaaaaaaattacttctggtttagattaaaagttctcatcctggctaacatggtgaaaccccgtctctactaaaaatacaaaaaaaattagccgggcatggtggtgggcacctgtagtcccagctacttgggaggctgaagcaggagaatggcatgaacccaggaggcggagcttgcagtgagctgagattgtgccactgcactccagcctgggtgacagagcaggactccatctcaaaaattaaaaaaaaaaaaaaagttctgtcaggtttcctctcttatccacatctcatgttttacttcataagactatgttaggctgggaatgcttatatttagacctgtagttctgctcaggtaagtcatgtggggagttgttcagaggccctggaagtaagctaagaagggcctgcatttgggagaattcctgaagcatttggggaaggggttgcagggttagacccctgtcttcacccagagcctacagcattgaggtggatgttatgacccagggttcactttcccaagctgcatcgtccacccaggtagaaagcatagttttgtcaagtacattgttagaaggtgactctttcttctttccctcctaacttcatcatggactgctactccagtatggcttgtgtttgggaatgttcctcctaaacacctttggtagagagataattaacaatgtttaagcatgtactatgtgttgacagtggtggacatttgcttgctgtgctttatgcatatcctatcatgctgccttcccctgctttggcaagggaaataaaatgcaaaccacacctgctgacactcagtcaggtacctgaagccattgggtctctgaagtggagggaccaggagagtgagtggaagggagactccatggttgtcttctggcagcttcattagagggctagtagaatctttcagcagccagaacacagccaattttctactctgaaaatctggtcatccaagatctggtcagcccaagtgaacaatgtgatcagattctatgtgtactgatgaccagttatatttcagtgtactctggatcctcacattcagcctcatgaatatttagcctttctagggaaaggcatcccattcttgaagatccatcaatgcccctttatgtggagggcagaaagaggatatccatgaagagaaaagaacctcatcatgttccactgccctgggaatagaaaggagagaagagagaggggaaggtgggagagagaggagagaggagagtagacttcccctcccaatttggagagcacatagtgatccacccacaggcatgagcatgatcaattctggattgatgaagaaggtggatgcctttttggcttctatatttttggctactatcataaccttcaggaggccagactgcatagccaatgtacagatttccagaaggaggaggggaataggagtattaaagaattcagggaaattaggccaaaatggcatctcccagccccccacaagggataggccagccttcaaggacctacaggggctcagcactttcaagttggacctaagtagattcttgggattttgtgtcccataggcatccttcaattgacaggcccaagactacttcaataggggaggaggtcttttcacaaagggaaagcagaatgcagtgactgaaaggaaggggtaggaacctggacaggcaatgccaactgatgtccacaccaaggtctcaagaggatgtcacatgcagaggaatcaatcaaaggataatttccagaactgtgctgaaaagacaagctccaagctgggtcattctgagaatttcatcagagcaagacaaggcagtctagttatggacttatccttccagaaactggggacaggcaagaaccaagtgagaaacagaccccagccagcggttaggatttgcatatgggttaggacccacggaagggagagaaatctgggaaaagaggggtgtggtttaggcatcaaggagatactacatataaaacatctggcatagttccagatggtacatgatgcatgcataacaaatgttctctctctgccgagggtatccaggagggaatgcctatctgaagggctgaggaatggggcagcagacagaagtccaggctgaactagagaggtcctggcctgttgtcctcaaattgagggcaggagagttgcagagcaggctgtgggtatctgggtgtatattcacaacagctaggctaggtaagggcaagggatggcaagcagctcttaatatttttagtagggagtaggatgagtaaacataggaaggactcaaggaaacaaccactttgcatgactcagatgcaaaaaaagacattaagacagaagatagaaggtgagatgttggcagtgctagcagtcctcagcaaaatgctgcctaaactgtgtccacagctgtgtttctcaaactttactgtgcacgtgaatcacctgggaatcatattgggatgcagattctgaattggtagttttaaggtgaggactaaccagctcccaagtgatgctgatgctgccagtccagggactaaagtgagtggtaaggctttttatggctgtgggccaaaggctctggtcaagagcatatagaaaactcagattaaacaaagtctagggcatgaacagaggtactgaaatttagtgtttcagaacctactagaccacaggaactacttttttcctggaggacctgttattatctcatagaagcctgtgcaggaaaagcttccttaagagaccctaaactataaaaccctgctcccactgaaggagtgcagcaccacccccaaaaccctctggaagaggccaaccttcaggtgcactggagctggggctttcccctctcttcatcagggctagtagagaaaaagagggccacagagaggtgcctatcatacgagtatgatctccccctcacttcacttctagataaaaacatcttacgctggagtaaaggagaagtacctgagtgaatactgcttttctggtacctacattctctccctccttctgcaaggctatcatttcacagctgattcctgggagcacatccatttcattggcaaggtaatttgggggcctgttgggctggggggaggttggggttcggtggtagtgactgaagcagtttggggcttgaaaaaggggggagtcagcatggtgtagctttggcttgatgtcctgttctgccattctgcttcaaaccctggcattctgtgtcaagccctcctgggtctgttggcccactgtgagcatcctcgctaaggacagctacttgcattttcagttgcaccttcccacataacagtgactaattccttacaaaacaaaacacaaaacgagatatattaaagtaacagcatttcagcagctacagtgactctgtgtgctgacttcagcagccctctgaaaggccccttccataagctgggaaagtatgatcatggtttcatcatccttgttggttattacttcaaggttgaccaatctgaaagctctgtgtgaagaaggggactgagtggctgtgaatgatgagaccgttgtttagaagccaggcttagcctgagtccggaagaagcaacctcaatgctgtgctttaccatagcaccacctgcaggtatccaggaatagagaacccagctgagcgactcatgcttgaccaaaaatacccagagcagtgtgtctctacctttttaagcccatgctcactagtggggaaaacattttaccccctgtattaaatatggtgatttcaagcaaaacaaagcattgagacagagggctgtagcaggcctgaggataacagtgtccttacactcttgtcagtgctgatcttgctaattcaaacttaaatcttttccttgttataatattccagacttcctttaattccagcagtttattttgtttgaaagattatacctatgtcaaatttaggactgacacacgaggtagtcatgatgtatgtgtgtgtatatactttttttttaagagacatggtctcacgctgtcacccaggctggagtgcagtggtatgatcacagctcactgaagcctcaaactcctgggattaaatgatcctccccacccaggctcccaaatagctgagactacagacatgttccaccgtgcccagctaattttattttttagagagacagggtctcactatgttgcccaggctagtctcaaactcctggcctcaagtgatcctccctccttggcctcccaaagtgctgagattacaggcatgagccactgtgcccagccagtgatttatattgtttgaactcttccaatgcatgatccaataattctaagccctaggtgataactcttctaactcctccaaccacaaacagactttccccactgtttgcagatccagggcagcgacgccggctggactttgggctacatgctgaacctgaccaacatgatcccagctgagcaaccattgtccacacctctctcccactccacctatgtcttcctcatggttctattctccctggtccttttcacagtggccatcataggcttgcttatctttcacaagccttcatatttctggaaagatatggtatagcaaaagcagctgaaatatgctggctggagtgaggaaaaaaatcgtccagggagcattttcctccatcgcagtgttcaaggccatccttccctgtctgccagggccagtcttgacgagtgtgaagcttccttggcttttactgaagcctttcttttggaggtattcaatatcctttgcctcaaggacttcggcagatactgtctctttcatgagtttttcccagctacacctttctcctttgtactttgtgcttgtataggttttaaagacctgacacctttcataatctttgctttataaaagaacaatattgactttgtctagaagaactgagagtcttgagtcctgtgataggaggctgagctggctgaaagaagaatctcaggaactggttcagttgtactctttaagaacccctttctctctcctgtttgccatccattaagaaagccatatgatgcctttggagaaggcagacacacattccattcccagcctgctctgtgggtaggagaattttctacagtaggcaaatatgtgctaaagccaaagagttttataaggaaatatatgtgctcatgcagtcaatacagttctcaatcccacccaaagcaggtatgtcaataaatcacatattcctaggtgatacccaaatgctacagagtggaacactcagacctgagatttgcaaaaagcagatgtaaatatatgcattcaaacatcagggcttactatgaggtaggtggtatatacatgtcacaaataaaaatacagttacaactcagggtcacaaaaaatgcatcttccaatgcatatttttattatggtaaaatatacataaatataattcaccattttaacatttaattcatattaaatacgtacaaatcagtgacatttagtacattcacagtgttgtgccaccatcaccactatttagttccagaacatttgcatcatcaatacattgtctagagacaagactatcctgggtaggcagaaaccatagatcttttgtgtttacagctatggaaaccaactgtaccataaagatagttcactgagttttaaagccaagccacatcttatttttccaaggtttaatttagtgagagggcagcattagtgtggagtggcatgcttttgccctatcgtggaatttacacatcagaatgtgcaggatccaagtctgaaagtgttgccacccgtcacacaacatgggctttgtttgcttattccatgaagcagcagctatagaccttaccatggaaacatgaagagaccctgcacccctttccttaaggattgctgcaagagttacctgttgagcaggattgactggtgatgtttcattctgaccttgtcccaagctctccatctctagatctggggactgactgttgagctgatggggaaagaaaagctctcacacaaaccggaagccaaatgtcccctatctcttgaatgatcaagtcacttttgacaacatccaggtgaatataaaaacttaataaagctgtggaaaggaactcttaatcttcttttctgctacttaggttaaattcactagatcttgattaggaatcaaaattcgaattgggacatgttcaaattctttcttgtggtagttgcctatactgtcatcgctgctgttggttgagcatttgtggtgtaccacgctgtgtgctcaagggtattacattcatcttctcatttaatcctcacaacaatctgaagaaggtaggtattacaattcccacttcatagaaacagaaactgaggttcagagaggttaagtcatttgcccaaatggctgagccaaagcctaccatgtacctaacctttattttctttcccgaacataccaggctgtctcctcataacttccaagcatgcacttaaaactccacatgaatacaaggttcatgggacttggtattcatagaaagggaggcagaaagctggtctgttcctgataggcttgtaatttaatatcattctgttcatgtgctttggatggaagcacatctggcatatgatgctaatcagtggttcccatacccctggcttcctaattttaatgtttgctcacagcatagtagattgacatcaaatagtggccgatgatgatgaaaataaaggtcaaataagttgagccaataacagccgcttttttccttctgtctgcgtatacaaagcactgtcatgcacacaatctattctgaccctcacaacaacccataagggtgtaaatagtatttccattttacaaatgaggatcacacaaactactacatggcagagcagatactccaactcatgtcttctggttgaagcctattgctttttcttttctaaacactttccctcagcaagttggaattagacttcacaagtctccttcagagaacacaaatcttttcttattccattcctgtttggttgcctacgtccaatctccccctccccagagatgccaaaaaaaaaatcctttaaggtatttgggagccaaactcaacttgttaaaatctcaaattatggagacaatcagcagacacaacctaaccccaattattttggcaggaaggttggtttagaggcagatccagcaatctgctttgggccactctgggtggggtaggtgaaataagattggtcactgttaactaattttaatattggattggccattggttatcactgattaccattctcccctggattttcacccaggactcaaaacttggttctgctaaccctgttcctttatgaggaaccttttaaagattcctttataaggtgggagttttttttctatgaacctataggggagaaaaaagatcagcagaagtcattacttttttttttttttttttttttttttgagagagagtctcactccattgcccaggctggagtgcagtggtgctatctcggctcactgcaacctccgcctcctgggttcaagcaattctcctgcctcagcctcccgagtagctgggattgcaggtgcccaccaccacacccggctaatttttgtatttttagtaaagacagggtttcaccatgttggccaggctggtctccaactcccaatctcaggtgatcctattgcctcgggctcccaaagtgctgggattacaggagtgagccaccatgcctggccagaagtggttacttctgtagacaaaagaataatgctacttaatcaggctttctgtgtgacaagaaagagaaagaaaataaagaagtttcaattcatccaattcttaataagaaatatgtaaataaaattttttaaaattacacttcattttaatgttgtatcagtcaaggtccctgcaagagatggatggtatggtacactcaaactgggtaacacaggagagttttcagaaagcaactaaatccaaaatactatcaaggaatcaatataaaaattgttaatatttttctcatactaaattttcaaaatattttgtgtctattacatttacagcacatcttaattaggactagctgtgtgttcacctcacatgtggcttgtagctaccatactggacagcacatgtccaaaaaaatacacgtaaagttaaagtttaaaagacacaggaactaagccctcattgtctttcccttgggaggtagtttaaagagctatagatgctgtaacattcttgctattatttattatatatgacattattcctaaaaaagcttttgagatcctaggttgtattcctcaggttttgttgccttcccatgaagatgtgaaggcagggatgcctgttattcagtccaagatgcatgacaagagaccttgggaaagtttcatctggatttaaagattaattcttgatgcttacattccatactcaaaatgtaaatttgaatattaaaataaagatgattttttttttggagctagtcttgctctgttgcccaggctggaatgcagtggcatgatcatggctcactgcagcctcgacctcccaagctcaagcaaggctacaggtgtgcacctaagtagctaggactacaggtgtgcaccaccatgtctagctatttttttttctgtagagacagggttttcctatgttgtccaggctggtctcgaactcctgccctcaagcaatcctcctgccttggcctcccaaagtgttgagattacaggcgtaagccactgcacctggccaagatgaatattttaatagctcacagaacaaagtttgccacataatgataaaattactatgaaaatatattccctttattgtcagtttaaaagatgaactgagtttcacccaaactggtctggcccctctctgattcaaataccaatagttgctctgattcaaattccaactgttagaacatgacagctgctcataactagctttgcttactaaccatgtttctttccatttgtattaggtcctttactttttataacagcctcaaagtttcatgaattgctgcagtaaacattgattttcatgtttgtgagtctgcaagccagctgggcagctctacttcaggtggtaagggtggatcagacctattccatatacctcttgttctccttgtccagtggtttctagggatatgttctcatgatgaaccccgcagaggctcgtgaaagtgagaggaaactaggatgcctcttaaggtcttggtcaggatggggtctcctgtcacttctgtcacaggctattgtaagtcatatgagcaagctcaataaaatataaacaagtcagataaacagtgggaggaatggcaaagtcatatggccaaggccatgagtgattaattttaacacaggaaaaaagtaaagcattaaatgcgattatttaatatacaatgtcttattaactgaaatataaaatgtgtttactgtaaaatataatctgtttatctcaccaaagaaatattatctttaaaaaatgtcattacttctaagacatcatcagtctgcaacttctttccatagccttaatcaggatgctgtggcagctcccacattagcctcgcattctaaactggtagatgtcctaggaaaccatacatctatgtatttttcttattttatacgtttaggacaatgtatagctaattacccaactttttatttgcatacaaatctaatacaactgaacacaatcagttttatcacaggtataatggatttttcaatagtgaggaggtgcctccatgagccttctctttagaaaagtggcattcaagactcttcatttgaagtgaagattgctatgtcttttgcattgctctattttacataaattaagttataaattgacactataatcaactgacaccatgatcagtgatgatgatcaccctcatcagcactagagttgacttgtttttataacccctttgcatgtatgttgaatagcaaagttcatcagagaacatgtattagtcaatggtaagtaagatactctcatctaagaaataacatcacctcttctaatgaagttctaagaagagagggaagaaaaagtcttgggagctagtcagggaatagtgtgtatttgcaattacctaaactgaactctaccattactcctaacccagttcctcctcctgtgttttacatgattaatgccacccctgcctcaatgaaccaagatcagctccatcactgggacctccccattctgcctgtgcaatatttttcttttttatttctccttctaatattactgttattgctccagtaaagagctgtaatatattttacctggactgataccaggaatggtggtgttgcttccaatctgttgctgctagattaatctttgcaaagcacaggcttaatttcattgctgctcaactaaaaccactggtggctttccattgcctacaaaataaagtcaacctccccatcagacattcaaggctttcaatgatccatggccgccagctctctccaggctcatatcccactccactcctctgatgtttcctacactacactacactatactacactacagccaggtagaatgactgttcacccaacaccactcaggttgtcttctcaacttggaatactcttgcaccttcaaagctcatttcaaatgccccttcatttgtgaagccttctccaaatttccaagtcagaatgtctcttccttgtgctaccacaaccctttaactgagcctccattagtgcactgagaccattctgttcagtgtctgggtgaagcttcctggtgaaaaatatgttacctatttctttctgaaaagttggattcagggatattatcacggacctaaggtaatagttctagccaacctccctgtccactgccaggccgactacaaacccttctgttgctggcgagctggtccgcaccactagttctgcttcactctatttatctcttgatgtaaccatcttctttctccaggttttaagaaccagcccaactcctggttccctgatgaagcttttattcccctagccacatggaacttttcctttttggaacatgcctttagtttctgtgtagtttgccatgcagcacttcattgtacacattattaaaacagaattttaaggattagaatgaaccttaaaagatcatgcatctcaaaatttaatgtacatacaaattacccagggattttgttgaaataaaaattatttaattttaattaatataaataattcagtaggtctggggtgaggcctgaggttttacatttccaacaagctgccaggtaaagccaatacatctgtccaggaatcacactttgcgtatcaaaggtctagatgacattatcattccaaagagtttcttttacaggctctcagatcagtgttcatccactacctgactactgtcattcacaggcattctgttccacagcaggccagctaacgtggtatttacaaagctcactcctcttatacaacaatccaagtgtttcttttgtcagttgtctgtgccccaggagatccctctctgccttgccttgccctctgcctttggagaccagcacctcatactcagtgaaggcctggagtgcttaagagggatttcttccagctctcttgccctggtcttcagtgtattagatgtattacctccatgctctcagtagaggcccataggaaagagtaggtaggttatgccagctcacacgcatcctttaaaaatggtttagaagtttagctggtttcttattactcctgtctatggatgtttccttctgtcactctactagggatgaaacagctaatcatgttcaatagttacatttagattggtttttaaaaactatgattgtattagttcgtttccatgctgctgataaagacatatctgagactggaaacaaaaagggtttaattggacttacagttccacatggctggggaggcctcaaaatcaggtgggaggcaaaaggtacttcttacgtggtggcatcaagagcaaaatgaggaagaagcaaaagcagaaactcttcataaacccaccagatcttgtgggacttattatcacgagaatagcacagaaaagactggcctccatgattcaattacctcccactgcgtccctcccacaacatgtgggaattctgggagatacaattcaagttgagatttgggtggggacacagccaaaccatatcattcctccctgggctcctccaaatttcataatcctcacatttcaaaaccaatcattccttcccaacagttccccaaagtcttaactcatttcagcattaacccaaaagtccacagtccaaagtctcatctgagacaaggcaagtcccttccacttacaagcctgtaaaagcaagctagttacctcctagatacaatggggggtacaggtattgggtaaatacagctgttccaaatgagagaaattggccaaaacaaaggggttacagggtccatgcaagtctgaaatccagtggggcagtcaaattttaaagctccataatgatctcctttgactccatgtctcacattcaggtcatgctgatgcaagagataggttcccatggtcttgtgcagctccgcccctgtggctttgcagagtacagcctccctcctggctgctttctcaggctgatgttgagtgtctgtagcttttccaggcacaagatgcaagttggtggttgatctaccattctggggtctaccattctggggtctaccgttctgggactgtggccttcttctcacagctccactaggcagtgccccaacagggactctgtgtgggggctctgccccacatttcccttccacactgccctaggagaggttccccatgagggctctgcccctgcagcaaacttttgcctggacatccaggtgtttccatatatattctgaaatctaggcagaggttcccaaatctcaattcttgacatctctgcacccacaggctcaacatcacatggaagctgccaatgcttggggcctctaccctctgaagccacagcccaagctctatgttggctcctttcagccatggctggagcagctgggacacagggcaccaagtccctaggctgcacacagcacagagaccctgggcccagcccacaaaaccactttttcctcctgggcctctgggcctgtgatgggaggggctgccatgaaggtctctgacatgacctggagacattttccccatggtcttggggattaacattaggctccttgctgcttatgcaaatttctgcagccagcttgaatttctccttaaaaaaaatgggtttttcttttctactgcatcatcaggctgcagattttccacatttatgctcttgtttcccttttaaaacagaatgtttttaacagcacccaagtcaccttttgaatgctttgctgcttagaaatttattccaccagataccctaagtcatctctctcaagctctaagttccacaaatctctagggcaagggtgaaatgctgccagtctccttgctaaaacataacaagggtcacctttacttcagttcccaacaaggtcttcatctccatctgagaccacctcagcctggaccttattgttcatatcactatcagtatttttgtcaatgccattcacagtctctaggaggttccaaactttcctacattttcctatcttcttctgagccctccagattatttcaacacccagttccaaagttgcttccacattttcgggtatcttttcagcaatgccccactctactggtactattagtccattttcatgctgctgataaagacatacctgagactgggaacaaaaagaggtttaattggacttatagttccacctggctggggaggcctcagaatcatggcaggaggtgaaaggcatttcttacacggcagcagcaagagaaaaatgaagaagcagcaaaagcagaaacccctgataaaaccatcagatctcgtgagacttattcactatcacaagaatagcatgggaaagaccagcccccttgattcaattacctccccctgggtcctgtgggaattctggaaggtacaattcaagttgagatttgggtggggacacagccaaaccatatcaatgattttgtactttaaccagctgaatggaagtacaatctcttgctatatgacacaataattatttgcaaaatgagtaaacatatcataaggaaattatttttacaaggtttgaaacctgaaatgcagtctattatcatacataactaaaaatagagcctcaataaacagattcccagttttgaaaatgcaacatttgtactccacattgtcagttttcttaggtatatttataaatactcctataaaaatgtaaagaaacacataatgtagattgctaattttataataacacaagttgattttgacatccaacttattaattatgaaatgacttttggcctagtaacaatgaaaatgggggcaaatacagataaatggtaattcttagaatgaactactcagcaccaattctaagtttttcttgatggtaaatcataatgttccctttctcctcggttctgcaatctataggcataccataattgtaatcaatagcttaaaaatatgtctctctgtcctattctgtatctgtatctcttggatttttacctttgcaatagtcaactgaaccatcttcttggagtactcatgaagatggaagtctacatggagaatacaggatgaatccactctgtctcctgcagtgaagtctgtttgaaggatgtatttggctgtcttctggacaggccattctaataacagaaacaaacaagttattttaaaacttattggaatattcaaatattaaccaaagtagaaaaatataatacacatccatgtgcccatcacagaacttcactgattatcatcatttagccagtcttgaagaagcaagtgctaattacaatcacaaatgaaacaagattcagacttcatgaagagcactgcgctataataaaagaagaaatgagcacatacattcttttactgacagtcaaatggtgaaggtgggcagaatcattatgtgatgcaacatggcaaaagtatacagacagtgcatccagaggaaggcaccttgctgaatgactagaatggaagtaggagacattttgcaggcccccttcatcctgcagggagaaccagaaccacagcagctctatttgcctattcctctttaaattacaaagttaaaatttgggagtagtagaaaatcaattggttatcttatagagtctcctagaatatttcattggcattgagaaggtggaaaatgcaaattatatactttaaaatgtaatttttgcttttcacatatgcttaaagcctaaaacctcttaataaacttcttctgaaatata

SEQ ID NO: 54 - DNA, 45702 bp, Homo sapiens
  source 1..45702: mol_type = genomic DNA
actcgccggcactcgcccggctcgcccgctttcgcacccagttcacgcgccacagctatgtgtccccgagccgcgcgggcgcccgcgacgctactcctcgccctgggcgcggtgctgtggcctgcggctggcgcctgggagcttacgattttgcacaccaacgacgtgcacagccggctggagcagaccagcgaggactccagcaagtgcgtcaacgccagccgctgcatgggtggcgtggctcggctcttcaccaaggttcagcagatccgccgcgccgaacccaacgtgctgctgctggacgccggcgaccagtaccagggcactatctggttcaccgtgtacaagggcgccgaggtggcgcacttcatgaacgccctgcgctacgatgccatggtaagacccgagcccgcgcccgggatagtagtcccggactgagagaggagccgggctggaaaagcagcggatggcagagtgtggcaagcctaggtccagggcgcggagagatgtggggataaagtgagactccggccagtgtgccagctggatgcatagaagtcccttggacgattcgtcttaaacggacgttattgcgcccccactatgagatgggagtatttagaggagcaggacccagtcctgcctgcgaggggcttaaggtggggtgcgtagaagcactgacagttatccagagctagggactgaatcggatccctcacgcagctctcatttactgctagatctttcaaagaatgctttatctcaatctagatctttcgaaaaatgctttatctcaatcttattgaaagggaaaccgcgtcgaagaagctgaataaattaacaggcaccatccccgcaaaaagggagacgtgataagaatggacaccagatctctttgaccccggagcttgagagtaattaagctcacagctttggggtagattctctgttcaattaccttctatgtgaccttgagcaagttatttactctttcttgcctcagttctatcctgtataaaaataaggattataattgtacatagtgcacatagtgtggtctctatattattaccagacacatagtgtggtgtctatatatgttgttattaccagacactataatatagggttaagaaaaggaaagaaagaaagaaagagaaagaaagaaagaaacttcagagagagccaaaatgtggaaagacttgggtttcaaaggatttcaataaagtaggtttggcggcagagatttaggaagagtccaacttaagagataatgggctcttaaaacatgtgcaaaagtttagttcaaagtcccaaatgttaggttaaaggtaatgccttttctattgcactaaattctagaaagggagcagaggtggttgcacagtaataaataagtacaaccaagatgtatatatggtggttaaaaaaaaaataaaaccaccacccaaatttaaccctgtgtaaaagccttgagtaaagggattcagcaagactgtggagaaacttgggagaagaaaaaagagctttggaagaggaagaactgagaaatctccagagaaacgtccagagaaatctgtgaagtccacaagtgtggaagggaaagggaagtgtgattaggctgggatacagaaggctaacagtacactttatatgagaagagcttagaggtcaggagagcacaatgctgaggggtttgtttggttttattttcccctctggaaacttggagaaaggaggacaggaaaagatgataagagggcaccattgtttggttttaaaggtccctccccaaccccccacaacaagaaagctcattttaatgagatgagagaaggggagaaagctccctccgttctgatgcttttgagcttatcagggacaccctgcagcagaaattccagctgatccttcagccttcagagttgatgaggtggggctcacacacatctggatttgaagaagaatcgtgggtttcaagaactctgtggtctcttaagcattggtattccacagctacacttccctgatactttgcactcagtaatgacaaaataaatatttgtagaattgagttgttgctaccctgtgtctccacttcctcccagaagggtagaataaacttacatgtgtttgttttattttgcatataaaccacgactttgtaaactttactttttgtgacactcttttctccacaattgtgtgaaccctttttagtggaaaaataagaatgaagaattcctagttttccctaataatatttccctcttgtaagtctagttgagctcctggtgttaatcatggtatcaaatgtttatgacaggacatctaggtgaggcctgagtaaactgctgtaagttacagcctatctcttctgtgtttgttcagaatcctttttgttggatgaaattactttctttcaaattttgctcaagaaaattgaattgggttctgaggaaaaataggctacttacgtaatgttggcagggggtaaagattgggagcggatcacatggcaaggttagatggctgtgtcctcaggacttactctgtgcagtttgggggtgtgtcaaacatgatttgacgtgcataaaatcccagttctgtagtgctaaagcatgtgctaaagctctgctgtactccagtattgcacagatgtttcactgtcaattgtttatattatactaaccctcagagaatttattgctgttgtggtataaacgttcctccactgtaaccactcaccgcatattgattcctaggacactggggattcaaatcagggtggaaaacagttgtggaggggcatctccagtttcctggagactggacctagttcaaaggagccacataaaaggactgaagcatatggaggacaaagaggaatttcctagaatccagctaaaacacaggagtcccctcgagcaggaacttccaaggaggtgtacactttctagacctactggagtaatcctgattgctgtagaggacccagggcaatcctggagaccccctggaaccactactaggcagaaaactgggaagaggatggcaaaactctccagttagtgtagctgtctcagtggaaggactgttgtcccctgaggcacgaggaagacagcatggaagcactgacagtatgcgcttggcctggttactttctctgagcttcatgttccttagctgtaaaacaggagtgataacccccatcttgcagaggttttgtgaggaatacatgagataatccctgctggtgctcactgaaagtgagtttcatgtgccctgggtggggaggaggggaattgtgaggaagggaaggtttgggttgtgcatcagattatctgattctcacagcctggcacagtctaccacctgcctgccctctaccatcttacctaagtaccattgcctaaactatttttgctatagttactcattgagcagacttatgaaatctccccacagcacaaaactgaaggtatccacctccagaggtgagattctcaccaagacaggctgtggggaaggtagctttgagcaggtctctagggtcccctagaaaggtgccttttctctgcttggctgctgcttctgaggccctggctgctgagcccacttcctgcccataaggctgcagccttagccctagccaattgctcctaaatgggggaggcagcagccagggtgggaaccatggcccccgcctttaactcacccaggggacaggttagtcagatagatggtcctttgttcgccaccctccacctcccacatagacaacattctaatgtgtttgatggactgcatatagttttgtttctacatgcactttcaaaacctttgtgtgcttatattttataatggcatacccagtcctgttatttagccctttctgtttcttacttttgtcctgaacttattgtttttatgatttgtccatgttgccctagatgcccttatacctatacatcactgtgaattgtgctctgtgtattttacccatctccacgtattttacccatctgctccctggctgatgggtttggagatggcgtctaacaccctgcctccacaaataatgctgctccagatatcttcctggatggtctcaccagatgatttctacccaggagcagaattgctggccacagggcatactttgagtactacaagactggtttcctcaatgactgacatcctccattctcttccacctactcccatccccaaacaggacatgtaaatttctatattttacctatatatcatggcagtatccagctttattgtaggtgtaaaatacacattgctgctttatcatgtacttttctaataactagtgagtttggacattttttgatatgtttgttaactttttaagcttcctcttctctaattgcttattcatattctttggtattttttaaattgggttagctttatattttttgactttcaggagttataggttttgatctgtgatcaattttagacattgcaaatatattatgatgatattaggtctattaattttgtccatggtatctttcattgaacagaaattcttcatttcttgtaattgaattaatctttttttccttgtggcttgtgcttttgaaagtttgcctaatagtttgctaatttaaagcttatcacctttaacactcctcactggaaattcagagatcaccacggttctctctgccttttaagagataaatctacaatctgtggctatgcaattcacttctcagcatcaccagttcctcatctataaaatagaagtttgaaccagcttacctctgaggtcccatacatatttgaacaactggagccctacagtgaaatgttttgattcagtgaagggacaggaggatggggcaaaggtgtagaggcaggaatctacacaatggaccaggttggaccagagtgaggtagcaggaatcatggcagaagaggttgtgtaaactctaaaggccacctgagaagtttgagttatgttgccatgggcagccatgtggtttctgcgtagaagaccactgtggtataataaaaaataaatatttggtccttgtccccagtacctgtcacagagttcctaaaaccctagaaatttcctaagtaatagaaatgtcctttgtgattcataataaaccccatgataatacctgggtttatgctcctgcagacttagggtgagatccctagatagcttcaagatggaaccagtcaccagcaagtccaagagattaggggatcaaagagttggaactttcggtaccacccaccaaagtccaggaaaggagggtgggactggagattcagctctacaaaaactcttgaacaagatgtgaggagctttttagttgctgagcatttggaggttcctggagggtgcacacccaggtagggcatgaaagctccgcattgcccccatatcttggcctatccattcttcacttggctgttcatctatatcctttgtatagcctttataataaaccaatgagtgagttctgtaagctgtcctagcaagttaattgaagccaaggaggaagtaatggaaacccctgatttatagccattcagccagaagcacaacctcaggcttgtgatcagcctgaagtcagggcagtcttgtaggattgagcccttaacctatgggatctgacaatgtcttgagatagtatcagaattgaattcaattataggacactcagtttgtgttttctggagtactgtttggtgtctgggggaaatcccacacacatctggtcacagaagtattctgtgttcagtgtgacagtagaaaaagcagtttgtgtgtatgtgtgtgtttgtgcttttgtatgctaatgagatgatctatggctgggggcccttagatagcttcgggaagggggctggtcgccagaaagactaatttatgactagagggttagaactttcagccctacctctcccacttctagagggtagatgggctacagattgagttcggtctccaacagccagtgaattaatcaatcatgccttcacgataaaccttcatgaagacccctaaacaaccagattcagagagcttccaagttggtgaacatattgaggtgctgggaaggtggtgcacatggagtgggcatggaagctttgcccatccactcccatgccttgccctgtgcatctcttcacttgcttgttccctagtcgtatgctttataataagccagtaaagtgctttccaagttctgtgactcgttctagccaattatcaatcccaaggatagggtcatgggaacctccaatttataactagttggttgggaatacaggtggcccaggactctcgactggtgtctgaagtgggggcagtcttgtgcatttgagccttctcacttgtgggatctgatgctaagtccaggtagagaatgtcagaatgcatctgaattgttggacaccaagttggtgtccacacagaattggggaattggttgatgtgaggaaaaaccctcccagctacatagggaaatcacggttttggaagatgagcagaaaagggtgggagggagaagacaagagagaagagggtgaggaaagaggccaggcagcagtccaagtgtgagatgataacacctgaactctggtaattgaggagaccaaatccacgggaaccagctgcaaaaggcattctgtctggtaggtatagggctaagggagtaaacgtgggggtgagactgggatcaagtccccttcctaccacttagaatctgtggactgggagcaggttatttaatctcatgaaacctccatttccacatgtgtgaggtatgtgattgttgtctccacccctagggtgctgtggggtttacaagagatagtagtgcacataatgtgcttagcacagggccagcccctagtaagtgccggctgtacttgccttctctttgcaggggtggctcaggagagggtgtaatcaaaagatgattatgagggttcaagcaccaggcaatgggagagtcagcaggttttaatgcttccacacagaggctggattcttctacttccgcttaccgctgacagctgaggcctgctacctcaagccctgaaatgcagtctgaagacttttcctggacttactgggcaccattggactgtacagggctgtggcagacaggagcagtggaaagagatttggatgggacgtcagaacacccagattttacttcttggctcttccacttactagctgtgtgaatttggcagtggtttccttatctataaaatgggggaattggagagggtggtctactgcatgttacttctcagcacctcagctcctccccacccctctctcttgcttctaatctgcctacatcacttggtttgtctctggacaagtctaagtttgcatgacaactctctaatttctccttcacagttatttatttattttttggcagctatttccttgtggagagatagcgtaggtctttcaggtgcttccatttggccactgtttgcaggtgaagaggtttccaggatgctcgcgggatgttactctggtagtaacagaaatgatggcctggggaatgggaagagtatgagcccagttttgagcctgagtctttggggctcatttattcattcaatctgcaaatcttcattcagcattactacatgccaggctctctgctaagtgctgaggatagcgatcaggacctgctagggtgaaaattactcttcagaagatagcagagtggataatggccattcgagttcctcttaactacacagagggactgggtaagatctataaaggagagaggttaaacagcaaagcaaaagtgactgaaattctaacacccatgcatggggattcttgagctaaagatctggtctgtagaagaagacacatcagaccctcatatttagcatctaagccgaaatcagcagtaagcatgtttcttctcccataaaaacttgtccctaagaagagagacaagtgcttacaaggactcttatgttaaaggaaactgtcacaattactttatcttcagtcatgaagcctttcttgaggaaagaaaaattagcaatactagtttgggaagcttgaaagagagattctgtttgcaatgacacttttaaaaaggcaacaacaaccaaaaaagtaattattcctaaagctcaggtgtcagaagttgtgaatgtctagggggttgtggatccccaacctcagagacaggaacagcaccactcccatcctggggctgtggcctcaggcctctgcttcctctttttcagtctaaattccagagcagagaggtgctggatgaccagcttcaggcaggggagggaggaagtaaaggtagtttctcagctcatcttgtcctcgtactattaatagcatctgttgttttcttaactgaaaattggagagaaccaaacaaatcaacatcatattggcggctttctgcacatcactcacaaatacatctgaatgctctgtactctccagtgtttattttcctcagccacataatcggaatttgaacattcttttgacacttcttttccctcacttgaataattagttctatatataatccaaatattagctggagccctctagcccctcagagatatagttgaaccttcctggacctcaattagttgggcagttaattctgaatgttgatgtgcctattttgcacgtatggagagtttgtacgtcccccctccccaaacaagtagaatgctgtctatttggtacttgctcattcatacattctttcaacaaccaaacccagttgcagctgggttgaaccccagggtgtttcctgctattcagtgtgatgccacattcacctgctgtggccaacattccttggcccaggactgcagggatggaagccaacccaacatcagaagtgggcaacaatgccagaaacctatcaaccaaaacaaatgtaatttgtaatcctccctggatgatgttgagtgattggcaactgagccccgtcatatagtaaatcaggctgtctctctttaaaaaagagagacagagagagagagagtctcccaatgttgcctaggctggtctcaaactcctgggctcaagcaatcatcccttcttgcctcccaaaatgctgggattacaggcatgagccaccatgcccagcctaggctgtctctttagctcttcaattatagggcttcctgcaacctcagcccttaacgaatgagctagcgtgtaagtgactagctaaataaatgtgctgcaaacctctgacaaatggctttttgacattattaaaatttatttatgtggaacaaaaaaattcttttcttctgcatcatgcatcctacactgcttttaaagaaactctgctatcctttgttttaccgtctaacatttctttgtttcccttctgacatgtttcagcctcttgtcatcacttggaacatttttactgcctcatccctctagtttccatttcctagcctagcccagcccagtatttttgaaacccaaatacctggaattttgcctgatgtttaaagccaaaaccaaatgaaaatgtgaagaaccaaaggagattttattcttctgtgactcaaaatcctgttgttattgttaaatgaaccctgtgggatacagtctggtatttttaacaccttctgggggtatttgtcaatatttacatttgatgtggatagcttataaaagtccagtggctttgggtaaaccctgttcactaagaataagacccagaaggtcatatgaatcaacgatcaaagaatgaagatattctgaatccaagtttcttgttttgattattaaaaataccttgcaattagttaggcatgagagaaagcttgtgtataaagtttggcttgtaattcacatgaattctctatacaggccaaaaactaccttccctttgggaatatacaatgaccttatttggaaattacttcaggtaattatgaagtaataatatctctattcatatgctaaaaagaattcaaaataacattcaattatcatctcttagaaactaaattaaacgggtactcacccaagttgaaatgcaaacaaatgcatgatatcattatgtgaccctcccctagcccttaccctgtccatggcagatgctaagaaaaacttgtccctaagaagagagaagtcaattgatttagtcagcctttcccactgtgtttggactgagcctcagaaccctccttatccccatactgcaaggagttactgtcaatcaactagagatggcgctcaagataaaattattttccatcctgtactaatataataataagcatggaatctatttattggttttttcacaacaataaaatatatctttagcaagtaacaaatggtagaggtaatacttttagataaagagggaagaatccttctgacttttctctttatcacattttacccacacacaatgtggatggaatctgcaactgaatttagcagtcacactgaaactctgctgcatgaccacactgtcctgaggccatgtgccaacttctatgtttttttttcccaaagctcttccaaggaagagctgccacttctccatttactcttttcacctgtaaatgaatgctgccgttggtattgagaaaatgggtgaatgaaagaaatcatgagaacactcctggggtgagagcaagaggaatgaaaacacgtggtgtgagagcaggtcagagatggtggttaacacaggaaccaggatggaggcctcagacttgaccctggcctgcaggacgttggcctgcattgtctgcaggaggaaacacagaggtcagtggatatcctgcggtcttccattaaggcctcttactattctggaacattttatttttatagagaaatctcccacttcctgatctccccagttagaattgattgatcaaagcagtccctctccctgttattaaataattaaataatatgcattagttgatccctataaccacttaaaatgtatctaacacaggagaaatctttggtaaatatttactgaatgaatgaacaaataaataattggagggagggagaaagagacagagttaaatcctgaggctggagtttttggtccttcagccccttatcccattgcccctggcagccccatccatgtgaccttgaattctgtccaagtctcatcactttctatgtgtgttgtaatggaaaaaaggttacaaaacacagtctttctggcctggagtaccaaaatagtaaagacttctgttttgaaagcctctgacaaatgaacacaacagccacagtgataactttagcaggaaattgaaccacaaaaagcaagcgagccacaaagccctgaaggctaaaaatgcctcacaggccaagaggcagttaggttgcacctgagacagaggctgctttcttaactgggaaatgggtgtctccagatatataaagctgtgaggagatcaccatggcccagctctgacgagccactggtacagcattgttggttagtttgcctcaacctgcagcagagtttttattccaagagttaacagttagttaggctttttccaaaggttgagatgacaccccaactcccacacccatttccgtcctgccccagcttgaaaccaggcaaagtgagttaagacattgggagatgggaggggacaggaggggtagaggcctggcacccctctctcttctgtttcaagagacactttgtggagttgtctagagagactgggggtaactgctccttctgcccccaatctccccttagctccccactcctccctatcctgccaggccaaccaccagcagagaagggcgcttagctccagtgacgctgtgagtgaggtacttgtgaggatgcatatggttcctgttggaaatgcacggaggagcagtgaaacaccagaagccccatcctctctcctgcccgtgccctcatgcccagccagctgaatattcctgtggcttccactcctgcactgtcccctcagtgtcacctccccaccacattcccacagccccacttgctgtgtcacctctcccctgagggagaggtgtcttcctgccagtctcttcaccaccaggctcacacaactcccatccattcactgcaggctgccagactgagctttccaagcacccccggactgcctccagccctactttctcttcaaggcttcccacttccctcaaaatgaaagccctgactccttggacaccatacagaccctccctgatctcccagcgatgctcttagcagcatcatttttttttctgccagattttcaggtgccctcagttccaggagcaccaaatcacctggatgccatgagctgcttatgacacagttcaaggtgtgacatctttgaggtctctccataacacctctactgcagacgtctgtctctggtgtatcagctgtaccttgcacacatgtctctaaccatctgtccactgtgtctgtctgttcacacatcagattgaccctatgttctctgtgacaccaggtgagctctggcaccagtgcccagcagatgattactgaatgattaataaaactactcactccacctgctgcttttaaatgggctccattttggtatgatttggtgcgtgaaccattaaaacttttcagaagtcaggatttgaaacaaacttggtaaaaagtagttaagcaatgtcttcgttgtaaagtgagaaaccaagttgcttggaaacaggtgaaaagcttagccagcagcttcacaattcacagcctggcactccagtagccctctctggacaattgcccaggttttcttgttttcatttctgtgttttaatttacaagttacctttatatttctactaataccttactggcacttgtttgtgaatgaaacaatttttttgagagtttgttaattgttctgtgtgagtgtggaaagtttctttcatataagatcatcaattctttttttaaaaatagtgttttaggttttctcctacataaagaaagtggtgggggtgaggagctgggggtggaccagatgctcacattgtatttctatgattttgctgttggagatactgaagatcattttgctgggctttgctctcttaaattacagaaaagtgcatttggtgaagtttagtgtttttagtaaacatatacaagatgtcatagggatagaattagtgaaggaatagggttcgtgaatgaatgagctcaatcttagtaatgaaatgtttggaaagcaacagaacaagagagaaagagcatcagaacatgatttaggtaccccatacatttatacaaataaaaaaaagatctgatttagggtcatagaaatcacatacctaaactgatggttaaacaataagtggcaagtaacagtttagctacaaaaaatgtacaggaacacataaggaaagttacatgggaactttcagagaggaccaaaaaaggtggaataagattatctgctctgttatgatcccctgtatttctctgctctatgttcttctcttgggcagtcttttcctgagatgttttcatgttattaatcaaaaataatagaaacgaataaactagatcaatgcatttacaagattttttgagtgcctgcagtatgcctcggtgtggtgggaacttggtgtactgaggtgagtagcatgatcctgaagagcttaggaatcactgagttctcgtaagtgcaatagaagaaaaactggtagaaggaagtcaaatgaaaatacaagtttctaaagaaaataagtatttacaaaggaatttgtctgcattaatttctgtggaaaagttagctatgtatagaagaaagaaacttgttagtaattctttcattcattcatttattcattcaacagtgaatccctgccatggtagtactaactacttgcactgtggtagtgcaagggatacatttgctgtgcaagtagttaggaattttttttttttttttttttttttttagtgctttgtgtatgctaggctttatgcaaatatacagccaagcacagaggttaagaactttggaatcaaaccgaagtggttctagtcccagctcccccttacaaattgtgtgatcttcaacagttcatttaacttctctagatctcagattttctcatcagtaaaatgagtgcagtaagagtaccaccctcacagcatgaaatcagattttctgtactctttactaactcactttccatgacgctggcatgtggcaagtgctgactcaatactggctcatttccttaactgcttttattttattcattcactgccattccagaggaaactgcggttctgagatgtgccctgggtcactgctgaggagcggacggagcctgggagggagctacccctgccttgtttcctcacactttatggggtgggtgtcaggaatgaggctggaggggaaggcaaaaccagatccctaagagccccctggaccctgcttagggtgtttacttctatcataaaggctgtgcttctgtagagacctaaggcagagagtgccaaggtcaggtttgcatttgagaaaagtttttctggcagcaatataaagaatagtttagcaaaagaaatgagaatagctggaaacccagttaggaggctgtggtagtccaggagcacactaaggcagcaacaataggtggatggaaactggagcatttaggtaagggagagggatgccagaggacgtgatggtgagggagagggaagagggtgggactccaccgcaccagggcttctggctttattgactgggtatatggtggcatcctgggccaagacagtgagtcacagggaagaggctttgagcctggtaagcttgggacacttttgagacattgggaggaaatgacacatggcagttgacatacagatctagacgtcaggagaaaagtcagggctggagattttcggtttacagttgaaggtatgagtaggaatgagatcatttactcagtccatcccaccacattgagcaccatgaataaggggctcctctccccatggggcaagagaggtgaaaagacagtcaaagtcactactttcaggaggattaggctcaagttaggatggggaggtggagaaggcatcaaacaaataaatgaaaactataacttcagttattgccaagtgctaggaatataatgttgctgttaaactgcaaggtggctaacaagttggatagtctttcttgaagaactgtagaaacattcattaaaaacaaaataattttatagttaagcaagaaagtgattgtactataacaagggagacttatttcaccataggaaaaaaatcataacattctaagaatagaaggaaaaaataacaattacccaagcctgcaacaacctgtaagaccagatcagcttttaagaggaaagttaattagataacaggaagaggtaaaaatgagatcatcagagatgggggaaaaggcaaatttagaaattctgaatttaataggggagacaagtatgtaggaatataaacacattgtgctttctctgcacaaacacattcacatgaggatgtatacacaacccttgcaggcacaggtactcagtgaatgcctgcgtgccaaggagggggacagcactgagcaggagaggtggcagggcctggtggcccaggagcactcatatagtcaggagactgatataaaagaaagatcctgctaacatgccattacagagtatggaatgagcaaggaaggaagagggtgaggctgtaagagagtgcacaggccctcatttaaatggacgggtcaccagccagtacttcatgcctgttcctagatgacccacaaagtgaaacgaaactggatgtggtatttagcaagtctgagatttgctggtttaagtactaagttagcaaaccagccttggcagccagagcaggtagggtagggggcccaaggagatgggtgtatccaggaggccaatggaggaaggagaggaaggttttctgggaagccagctgacatgtcatgctttgtcagtggggcctctgcatggattccctccactcccccccagcccccaactcactacggggagctgcaaaatgacagacaatgggtggttttgtacccagcagccactcctcaaccagtgaggaatgggagagagataagaaggtgggaaacaaggattgcttgtcaccatccctgctcctcctgaagccctgcgctgggagcaggtacagaacccgctgaaggtcacctaatcatttcaccatggagttcttccccagatgtgaaactgctgggactggagcaaagggtgcccagagctgactggaggaggaagccagagccacactggaacatatggagatgctagctcctgcctgctattgaggaacttcattttcccagaagaattagaggaccacaggagtgcttgggaagaagcaattgtggcaacctaggtgaatgatgacctaggaggtgaaatgaggaaggaggcctttggtctctgccaaccatacatttcaggttgccttttgctaaagtcctgctgatgttaatcattctctccagcagatcgcggcttgaatcatggggtctgaaatgtgggtttatgagagaaaaacaacatggaaaaattgggcagaggctggtaaatgtgaacattcaaacctgcccccaatctgagatggtgggacagtggacccctggccagctctccaggtgttgcgtatgcacattggcaaaccacctttattaggtggtgtgacacctgggtagcaattctcaagcaatgtgatgatctgaatgtccctgggcctgacccaggtgaggaggacacaaaatcatgcaatatgtctcatagagcttagtcagttttgagaaatactggactaatgttatgtttttaaagcacctaattctttttctcttttctgttttatctaggcactgggaaatcatgaatttgataatggtgtggaaggactgatcgagccactcctcaaagaggccaaatttccaattctgagtgcaaacattaaagcaaaggggccactagcatctcaaatatcaggactttatttgccatataaagttcttcctgttggtgatgaagttgtgggaatcgttggatacacttccaaagaaaccccttttctctcaaatccaggtattttctacttttatagcactcaatgcttgaaaatagatgccctaaatcacagcttggcattatatttatggactgtagataaaagtaggaacaactgggtaaatagtgcactagaataacactgataaaagcaatctggtaaattctatgctgttgttccaaggtacttcttaaagagatgtcctcttctgctcagtgaacttctttgttgacaaaaacagtatctttgtctaattcagtgctttcaaaatgggaagaggagacaatgtatagccagtgctaaacagtacagtttcatttactagagaatgagagcctcaaaactcactgcccttctcctgtggagccatgagcacagagccagagttttacctcaatttaccttattgctccttttctaggatgattattacatgtccagctaactcacctttctcgcttttcattattcatctcgttttaatgacattcttgtatctgactttctgggaaatatatatagtggtcttatgatatatatggatatatataagtgtatgtatatacatttatagacatatatacacatatgtatatataatatatataatcttaagacacacacatacatatatgacacatatacatacatacatataagacacacacacatatataatcttaagacccttcaagaaactattttgaggcacttttataagaaaactttttggaatattttggcaatgagaacaaaaatgacattttctttaaattatccaaattaaatgtgtttccatatttgaagaaaaaaagggaaaataggagccagggttatctagaaacatgagttttcattaagaactaactgataaaggacatataattgacaattcaaaaatatatatttactgttgttgttgttataaaataaataagtccaggccattggaaacaacaacagaaaagtcagctgtgtttgctgagagcagcaagcgggtcctgcagctggcatagaggcagagctggaggcagggtggagcggctggggctggagtggtcagtgagaagagtgagagaacttgctaaagaaccccccaaccccaccctggggtcaggtttacttgctgaagaacctccttggtccccttgagagctgtgtaaaacatccctggggcacaggacattccagaagtgaggtcagagtcacaagctaggatgcaggctccatgaggacagaaacctctgctgtctcactattgcccaatgactgtgcacagtgcctggcatatgataagtcctcaggaagcattgctgggatgaatacatgagagcaggaaggtataggggccacagtcacagaacagcagatagttccatttcctggagcatgggttctgactaggaaaagctagaaagttggatcagggctagattgtagggctgagaagttcaggtgtgatttggaggaaagcattgtctcttctttaaaaggcacccataaggaggtaggaggtgcaggtcttggtggaaaggcacagcagctccagaaatcaaactgccccagctgggactctgaccagccctttaccaggctgtaacagagaggggatcaaaagtgacactgctgtttccagcagctgctggaagagagggctgcattttgcagggcccagtgtggggggaaagggatggggtggaatagaatgtttccaggagcactgcttcttccaagactacaggcccagcggcctggtgtgggttcttcctacagttctttgaccctaatcaagcccagttctcccagtcctagtggcctgggcacccacagggttataacctgtatttctagcacatttaatctaatttattttagctagatcattaaatacctgaaatacaactctcctcatgacatcttgaaatataagccatgctttgtatatatgggatgcctggtcctgtgaggtttctgatataatagaggaatacattcctttgtcctcagaggcatttctctgaattttttttccttcttggcagccataccttaagcaaaagatggtagcatactctcgacatttagtcattcccctgggtacctgtctgtgtgccaggcactgttttaggcaccagggatactgaccaaaaaaaaaaaagttgcccactggagcttacatattcagtgggggaatcaataaatgagtaaatggtttggtatgtcagaaggtgctaaggctgtggagaagaattaagcaggaggggaatggcaagtgcagcaggggggaaggtataccttgttgtttcaaagagatgctcaaggaaaggctcacatagaaggcaacatagcactgagggtcaacggggagccctgggcttcttggggcaaccaacaggaagcagattgtccttgatgttctcataatagacaacagtggcaaaactacaactcttgatttttcaacattgcctatgagttacagacagccttgcctgtccaacacatctgtgagctgctaattattaggttgtcattctggggcctccctggctatgatgtcagccatgaattatcttccatggtaatttgcacttgtggagttggctaatgttaaggattcaggagttcccctgctgaagcacacagacattcctaaacctcacagtggaacaagggatgcatttctaataatcttgttactctttggattagtacttttcaaactggagtttgcagactcctgcattttgaaagcttttaatgaaatgtcattctcccaccctccttcccttgtttagtgttagttcttagaaatcagtgtaagaacgtctggatctactggaggactccctagtcacagagtaccagacatgacttcagggcagcatgtctgtatttgcagtcatcttcatgccagtgatagccataaaacctcaaagcttcctcaaatgtggctaacagagccagttggaggaaccagttgccttgctgcacacagagaacctgggttgcacagtgagagccatgcttgactactgataacaaaaggctatcgtttgttaccactatgtgcagtaataagcacccagggaagaatgtacacaatcccagtgccagcaacatttagatgaggccctcatgattaacacagagctcaataatgctctaatgctggcattatttatatatttatatattttttgaggcagagtcttgctcttgttgcccaggctggagtgcagtggtatggtctcggctcattgcagcctccgcctggcaggttcaagacattctcctgcctcagccttccaagtacctggcatgtgcctccacgcctgaataatttttgtatttttagtagagacagggtttcgccattttgcctgggctggtctcaaactcctggcatcaagtgatctgcctgctgcagcctcccaaagtactgagattacaagcgtgagccactgtgcctggcctgctggcattaaagagaacatgacaaagttatcaactgccatattaaaataggcattcaaggactacttgctgacagttttaagtttgaacactgattatcccaagtttccaacgaacgtcttggagttgctaatactcttttgtgtatcatgcttacgtgcttaggcattttctgcattggtattgtggaagttgagatgtacaaatatataaaacaatatctgaagcctcctcacagtttgcaaccaagttcaagcaaaacaatatccacaaccttaaactaatacaacataaagtgaatgtaatgaggatattgatttgaatttttatttacttcttaggggttttgtatttaatgaataaatatgttttggttttactgactcttgagctttagtaaattaaggtgtttaacctttgcatgttaatatgtatattaagtaatataataaaaattgttaataaatatccattttatttattttgttccttagggacaaatttagtgtttgaagatgaaatcactgcattacaacctgaagtagataagttaaaaactctaaatgtgaacaaaattattgcactgggacattcgggttttgaaatggataaactcatcgctcagaaagtgaggggtgtggacgtcgtggtgggaggacactccaacacatttctttacacaggtaattgtttcaaaaggattgcatgggccaggatgtccagataagcactgtgtctcttttgcctttgtaactgttattactctttttactgctatttaatatgtaatgtatattatatgatctataatatatatgtaatatacattaaatgggaacatgtgcaaatcttacaaacattactaagaatttattgatttcatgattataagtcaattccatatatttatgtatataataaatatataagacataaaatatgtataaaacatatatataccatacatatgaaaaacaaaaagactattgagccccaaccaagtcatttatgatagattcttatcaaaaagcaacatgtcatataaaaactttaagcataaacaaaataatgtaaataaggacctttataactcaaggtggatttgatttgtaggttgcacaggtagcagaggctggacctcgagtgtgagtcctaactctgctgcagactaggaatataagtatcctggaagccacatgaccctgggtcctcaggagagcatgcactcttcctacccactacctgactacccccaccactctctttttttctctctcaaattggtgttaagtagttttcatcagaataactcttttatgatttttccactttaaacctataatgtcccaaaacttttgaatctggttccacctttcccacttcccccaccttgcactgcatagatctttgaagtattcccaaggaaaggaagaagaggctggtaaacagttcttctatcagcattcgcaaagaaggctttggcgtgggaacagccctccccttgaagaggctcctgcttctaccatccttatgtgggctgtcaaagaccatgctattttgataaaagcgaaactcaaaataccccaaacaataagtaggaaatacccaaaaacattaaaagggattatcactaagaaagtaatttttattttctttctagtactttggagtattttcaaataatgaatgcatgttacttttgcaatcggaaagcaaaatataaattataaaaaggaaagaaacacaatattgggtcaaaagtccccattcctaattcacttgaatgactttgagcaggtcacttagcacctctgaatctgctagcttagcttcaaaataggggatgatcatgctcaaagttccacgttactgtgaaaattatatgagatgtaaaaatatgtgaaagcagtttataaactataaatagctatattctggtatgcagcgtcatggaggttgcctgcttataaaaatatgtcagtcaaaatcataactcacaaactaaagttggccttcacttaagaaaataccagtatgaatgtgtgctaattaaattccttcacagatattttacttcttggtaaacacaggctaaggaataatttcaaactgagttaaactgacaggttgtgaaatcaatttatgggttatgaccagtagtagggcttttttttttgacagataagactaaaatagattaggcacttacattactcataagaatgataaatattgttccatgggaaaagatgtatataagatgtcaagaacagccccaggcacatagcagacaatccataaatgtgatgaggatgacgactagcactggacattgttagcatggataacattgcaatcaaagagtttcaacaactccatgagggttaaatgaactaagagagccaagacgaggaaataattggagcaggtcactgggaagcactgggtaggggtgaagactcaacaaagtccttctgactctaccactaatggtggggtcctttcaatgcctgattaccctcatctgtggaatgaaggtgataacaacagtacctattataaggggtcactgtgatttaatatgtgtaatgaatgtataggtaaatggccttagcacagggcctagtatgttagctgttcttattttagttatgtgctggctcactggataagacctgtgaaaacccaaaccttagcttttcactgaggcagtgtcagcacccttggacacacagtgggagctagatatgtctcctcccccttcttcctttagaataatggtttcaaaaagtttaaactatgacccgtagtaagaagaacattttagacagggagccaaaacacacaaacatatatgtgtgtgtgcgttcacatacgaacatgcaaaagcacttgtatgtgcaaacacatacaagtgaaagaaaactttcacaaagcacatggaatgcaccccaacttttctgttttactgttttattcacttaatgccagctaccactcattgaattgattttcttgtactgtagttaatccatgtttctaaaaactcagctttaaatgggacgtgaccaaaataatgcatgaacactcaaaggagtttcatcccttcattcagatgtgaacattcctgtgttccccttgacttgtctttacaccatcttaatcaatgctgtcttacagcaacaattagtcattcatagcctgtggtttgtgtccatcagtgagtgtgccctgatagacctgaaaagattgggagaccatgcccagcttcccattatttctgtagcctgtcctttgttcccataacagtacagtcatgccttagtatctgtgggggattggttctagaactccctgtggataccaaaatccatggatgctcaagtcccttatataaatggtgtagcatttgcatatgacctgtgcacatcctcgcatatattttaagtcatctctagattacttataatacttgatacaatgtaaatgatatgtaaatagttgttatactgtattgtttagggagcaaagacaagaaaaaatatatgttcagtacagataaaaccatccttttttagaaaataactttttgttcatggctggctgaatccaacaatgcaaaacccacagttagagacagccaactgtatgtgcctttgctaagtagataaatttagttaatgatgaaggactggatgaaagaaagatttgaggataaaaattagagtttgcttatctgtaaatcctgaagtaaataattacagtctctgagaaaactgagataactaatacttagtcatttacttcacatttcatgattgcttaccaagattaaacttgttctgatgaaaatcttcacttttcatactcatcgttttgatgagtgaacttaacaattaaaggtggctgggcacagcagctcatgcctataatcccagaattttgggaggctgaggcagaagaattgcttgagcccaggagttcgagaccggcctgggcaagatagggagacccccatatctacaaaaaaaatttttaaaaattagccaagtgtaggggcatatgcctgtagtcccacctactcaggaggctgaggtgggagaattgcttgaatcggggaggttgaggatgcagtgagctatgatcactccactgaactccagtctgagtgacagagtgaaaaccctgtctcaacaacagcaacaacagcaaaaacattaaaggtaattccaggacacaatagggatgaggcatattgcctgtttaaataaactttcctggccttaagaaaacaactctgctgaataattttatggaattagaatgacattaaaataatgaatctgataaatatgattagttaataaaaatacagttaaaataatacatcccttggaattttaaatcttactgagaaccatttctgcacgcacagtatccaatatacaaacacacatggaagaaaacctttccaaagctcgtggattgcaccctcatattttctgttctgttatttgagtttttaaatgctggttaccacccattatattaattttattgtattgtagcttgctcatatttttttaaaactcagcttcaaataaggcatgactaaaacagtgcatgaatggatcccttccaaatgttgaaagttattccagtttctttcctttccaagtaccatgcatatgcagctaaccctagcattggctgaccagtctaacatcagagtgaagagaagggaacttccctctacaaggcttacaaaatgataaagttacaaagataagagctaaaatgcaaacgctttctctaaagaagttaaatcctagagtcacgaactggtccatgttgcttcctttagagaaaaaagtagtaaaatcagtgcaggttgaaacctgcagcaggtacaacaggggactctattctctgtgctgtccttgaagggactccaaagatgctgtttctctgtttgcctcccagtattttaagtgagttttggattctgcaaatcaatctggctagctatggccttgggtgaatataagcaccagtttctatagccgcaagttaaagggatttgaattgttaattctgtcatccctcccattctaacatcctgttacctagaaaatcatccatacatagagcctgaaagcttacttttcaggatttggggaaataaaaaaaaatttggtagaatacctcatactttcattaggctactgatatgaacttaattattcctctaactcctttgaggctcagaccttctgtcccctgtcttatcactctcatctaatcacctccaagcaatgtcccacgtcactgagaatttagtatccaatttcctatcttctgctccactccagctcctgccttcacctggcagagtgtccatgtgggtagttgatccaataccccaagttcagagtcccttgatctcctcaatccagtgactgacacctccactccatttcagcaacttcacttctggggccacaggctgagacttgattatctccagaatttctccatgtccaaaactgaaatgggatagttcccttgaccccttcgtgggactcatgaaggggttgtcttgtttactcatcctgcagctctcaactcctcatgggagggagagcacataggtgagtgggtgcagagggtgggacaagtgcttctgggtgctggcaggagtagaactctgtgcggccccgcagcagcatctaggtgagtatctgtgacccctggagccgcagagggcatgtgttacagtgtgctcttttagctttgctgtccatggacagcttaagtgttttaacagctcagtgtgacagccctctgtatcctgaactcttgttcagcaaccaggaaggatcagcttgcacgaacaaattgaagatggtgaatgtggagaactttattgctgatgaaaatggctctcagtgggatggggagctggaaaggggatggagtgggaaggtgtctccccctggagttaggccatccccagctgaactcttctccgaggtcctaccgtcaagccatccctctgaagtcaagctgcttttcaccagtgtcaagcttcttctcttctctccttctctgccattccactgccagtggatcctggggtttttatggggacaggatggggggcagggcgggccagggtgattttggaaaaggcaacattcaggcagcaaaatggggatataaagttctcactttgggccacgggtccaggcttgagggtggagccattgccagggaccccacccttttctacctagtatttccctgcctccactctccaactctcttatcacaggcctcctatccataaatctttctcactcccttattttttttagagctcaccttcagacttatgaaagctcaagtcttttgaattcctctttccctcccagtccagcaggcttcacttctctccttgctagcctggaagtgtccattacacccttgactgtgtcgcggctgacacatggaaggcaggtgtctggtattgttaaatgaacgttaacaagtgcaacttctttaaaaagtaagatttctttatttgattgatcagttttttttttaattaagtatctaatttccattgcttctggatttaggcacacatattgaatataaaattcaaaacttttcatgtatctaaagaaataattttaatgaccacagaattttgctcttaaaacaaatggagcttgcaatataattataactaagacagactacaagcacctgctgtgttttcttcatgctgccatcaggctggtgcatagtctgatgggatggatgcatccctgctgtaataggaataagtaaagagggtgggagactgttgttggtgtttacaatcattattcatctctccattaattttcatccttgcagttgagataatcttgccttttagaacgagaaaacaatcttattacttacaacattcacaagacagggaaacactcctcaacaaagaaccatttcctttgggcatttgataagaactgctgacatctgtgtttattaagtgatgtgggagaatcagccaaggggcagaggtgtgggtggtagcttcaaaggtaatttcctgactgagtgtggttgggcatgttggcaatcccagtgtttgcaattccagtgctttgggaggctgaggcaggagcatcacttgagcccaggagtttgaggctgcagtgagctatgattacgccactgcactccagccagtgtgacagagagagaccttgtctcaaaaaaaaaaaaaaaaaggattttgctttcctggtctgtttgaatgtggtaagcacaagaacttatttgtactggtggtcacccacttgggtcctttcagtaaacttctggccatggcccagcctgagcacctgcttcctttacagagcaaagccagagccttctggtttgtaatttttgcagccacataacactgatccattttagctgtctcatgaaactgctttccaagatgaagtgagactatccgaaaccaaaatctaaaaagaatgactacagaacgaatggcagtccaaggtcatttggcagggtagaattataaggaaaggtgatggccagctactgtgaagtcttaagcccactcataggtacgaatctcttaccaggactgaagtttgtgtttccttaactttgctgcttgatggtcttctgcaaaggatctcatttctccagctttcactgggaagtggcatggggttttcgaaagtgctttaaactctaagaactggtttcctctcaggcttagccaccactagctgtctgactttggacaagttactcaaccactctgagcatcagctttctttttttaaaatggtgacagtgatatggctaccttagagagttgtggagattaagtgagataatatatgaacaaaatatataaatatgtctatattagacatatatgatctgttaaatatatttatatatatatatagaaagaatattagagaactgacatatttatcttagacctactatgttctagggcccagttctgctcatgtattatctctctatatatatagtattgagagagagaaagagagagagagctagagaaatagaaaccagtaggatatatcctatctgaagaactctaatacaggtatttcactgaacaaaatggcttctccttaaaatgtattccaacaccaatttcccctccttgcttctcatacatattaattcacagaaattatattggtcataaggcggtaggactatgaataatttttttcttctgcatttgccaaatattctgtaatgctagttttatttttataacaaatttttaaagtccctgtaaaccctataaaattaactactaatcctaaacttgaactgtaatacatatttttgttaaataaaaaaaaagatatcctaaatttgagaatctaagctaaattcacaaaatgactaaatgtatcttcttactcttaaacgataagaaaccaggaatgcagtggtttaacccaaacagcctaggtattcttcactcatttctcttgtcctcagtatatgtttcccccaggccaagaaacatttatggctaggaattcatgactgctcatctgtaagacactctccaagtactctgtcatgatttggaaccagagctttggccttccattccagatgacctccaggttctaagctttatctgaagtactccacactacattgcacaccagcatgatgggaaggaatgactcaagggaactgggcattcagaccactcaccaactacacacagcctttcacacagcagtagacaacctttgtaggaagacctctggccaaatatttatatatcaggagtatatcaatgtatggtcacagttacctcctttttaatctcaagaaataaagtcattacttctgaaaagaacaccagtaatggaactacacgggcatgccaagatgaaaattagtctctctctctctctccaccccattcttttggccactgcattttaaacaggccatagtgatagaaccagaaggtagctgtgtttcgattatttttgttttcttatttttaaacattgctttatagaagcctgttctataatgtaagaagtgaataggaatcctagtatctggaatgatgctgagccatggagatggccagattccatgtgaagagaagaggctggcagaaagctaagtatttgctcgctttccctaccctgtattcatggagcagccattacaaaagatgacgcaccagaccatgggcctggtcttgctaggtggtggagatccaaaatgctgggcactcactggagctccgtgaagatctgttgaatgagtgactaaatgtgtggtgaactgtccctacctacagggttccctgctttgcccagcctatcaggcttgggtacaagcagatagcctggattggatttcatgagggctttgtgcccactctgtatactaccggaagatgcataatctctttagacttcctgggtcatcactgaaaggccagaggcaagaatttgagcagtaaattgaagcatgtgcagagtgacatagtctgggcatagataacagtacctgacccctcaaattccctaaagttgacatgacagcttgtgcatcatggtttggtacagagatgactgaagagacagtggttgctcctctggttgctggacaccttttgaatgggctgtgatgactggagagcgtgctctgtcctggtcacctgaaggtgctcctagactagcagaagcagagacagcagccaggcctgactggagagctggagggactgggtgcaggggacttctaggccagcagtttctgtgctgtgctcggaggggctctggtggcaggaacctagtcctgggttccagctctaccagggtgcagcctgaggaactcagctttcctatttattggcttgccttgccacaaaggatttcttgtgtgttaaagatactaatagcttaaacaaacaaacaaacaaacaaacaaactattgatttaaaccactaatcaaatctttggttttacaaatttagaaaataaaattaggccccagggactaaatgtctctcctatggtccagaaaccagactgaaactgacctagtagcaaaacccattctcctgtatcccaactcccagttcaggttcctcttcattagctcccacccagctgcatagttgaggacactgaattgaggggacctggggtaaagggctggcactcaggcatcgctggcttctacatgattccaccacatggaaagcatcataatcatgtatgatccctagaaaagtgtttgctaaactccttaagttgtcattcaacaaacatttatctagcacctaccacatgctaggcaaattctagagacacagctgcccctgccctcatggaactaaatgtcttgaaagagatactggccctgatcagattttttaaaaatacataattatgcaaataaatcatattatatataattacaaagcatggtatgaaaggaaaagtacaagatgctgtgaaagcgtataaaaggaggacttggccaagtctagaggatcatcagtgagtgttccctgatggactaacattagggccaagatcagaaagatgtccaggagttaacatggtcaataatcactgttaatctttattaagcatttcccttgagtcgagtcaggcttcacttgctgcattaacttctttaatctccacaataactctgtaaggtaggtgcttttgctttttttccactttacagatgaataaacaagaagtaaaaagatgtaactaattcacatgtagccctctggcttcagaagctctttactccataaggttcctgggcacgtgggtgtggtctaggaatgggaagaggctaagaatgctgaagggcagactgaatgttccagatgaagctggcgtgataagaaagggccacatcatgtgggtcttataggttatgatattcatgttaaaactgttaatgtttttgaaatatctaaaaccaggaagtgcatgatcatatttatgttttagaaagatcactcaggctgctgtgtggagactggagtagaaagaagcatagaagagacctacagagactaggaagctgtcacagtaacctaggcacaagatagtagtggtcaagactagcttgcttgaggaagtgtagagaagtagacagataaaaggagcatccaaggagtgtacacttctaagtaatttaaaagaaagagtcaaatcccttagaagcaatcatttgaaataacctaattaccaatcctttttatccagtcctcttatgttgtcccaattcaggaattcttaaaccagttcttgtgttaaaatcatagcatggactgccttacaacattctatacttcagtccattgaaaaccacatcaggccaggtgcgtggctcatgcctataagcccagcacttttggaggccaaggcgagaggactgcttgagcccaggaattggagaccactgaactctagcctgggcaacagaatgagaccctgttgaaagagagaaaaggaagaaagaaagaaaaaagaggaaggaaggagggaaaaaaggaaaaaagggagggagggaaggtggaagaaagaaaaaaaaagaaagagaaagaaaaggctgcttcctggcacttctattaccatgtgacacgagaagggcaattgtccagacccacacttaggttcaccacagtccttggttcccaggacagagtcctttgaggttccttcaagcacccacaccatgctggaaaatgcaggctttataaactccagatgtcagtccacaactccacagccccattgggtttggttcctggatgaattctcggctagatgactggaatagagttctggtgaacatcttccttcctgccaagatgacaagtcaggtttctaaagacagatgtgtagctctttgtggaaaaaatattctgggcacgaacatcttcggctgaacggcatggaatggtgtggaaaatgtgaagccctggactggtttctgtgtcagtggtttcctgggactgccgagttgaaggggagcagaaagggctcagctgtggaggaggcagagattagccaaactagaccagctatcgccccagctgcatggatagcatcttccttcttgttcctgattaagctcatttaatatgccaatgacaaaaggatcatgaaggtctttccaaatgaatgaatgttttctggagctgagattgctggctcctatttgcatagtagtgcatactgaggcatctgaccggattactggattcctaacttttacattctttttaagctcagatatttctacggaaggcagaaagataaaggccaaaaaaagatcaggcttgcctagctcttgggtttccaggaaactgacagactcctgatatctgcaactagtgctttctctccctgggcggggcgttctccgccaccttgtggacatttggggaactgcaccgccccagcatctatgatcagaggaactgacagaggctgccataactacctggtcccctgaaataaaaaccaggcaccaggtttgcccaaaggaggaccaacacatagcagaatgaggctgagtaggatgttaaccttccatgctggtcttccattatcacgttatctgccactgtcacagacaacatctgcatccgctacagatggagatggaacaaaggctttcactggatctcaagttggatgcttctgtaaaagtaaagttccaagacctttttcttttttttccccagtgacagcaagaaaattggatgttactattggcaacaactatttcctgcttgtgaagcgttggtatttgcagtgcttctgccctgtggttattgagctgaaaggggggctgctcttgacataggagcatggcaggattggattcttcataacatgctacccagcttgtcttatgtgaaaagagaagcccagaaagagcttgggacacaaagatgcaaatcctgggtttgcatttgatttgttaagtgtcctttcacaaccagcttgcagactttaggggaaaaaaaatacatggtaggcttgtgggtagtggagaaaacataagctccagtacctcacagcctgggttttcagtctgcctcctcccaaccctcatcacataccagctgtgtgaccgtgggtactctgtctatgacaatcaattttcttgtctgcagagtacagataatagaggacctgccccatgggaagcttggaggactaaatgagattaagcccagggcctggctcatggccgattctcgtaacaggtccatgtgtgtaatcaacatgtgctgaagttctctggaccctctgtaaatatctaataggaacgactagccatgggtgtgatgagggagatgctagaaacagtaatggggtcaaatgaatctgtcccatagtctctaatttgaaacagctgaactgtgccattgtctccttggaggtaagatataagccacagagtgcctgaagcaggtctacagttaaggaacttaaatgtgctaagtgattaaaggctgggctgcctactccctgtatggcgacactctccaccctcctgcatactctccactactccaggcagtggtgggcctcctagcctctgggtgatgagcagctcccacatctcccctttgagacagaggcctgcagaacctgaccagtgtgagggctggctggggtcaggagtgtgcctgctggttggccctcaaggtgaatgtggctcttctaaaagacacctgaagggatgcagaatttagcagcaaacgccaagaacagctctttgtcatctctgcatcttctactaaagattttaagctccgaagtatatgtctggggtttctagagattgctattcccttataagggaaaaaatacacccttattgtatatttattgagcacctacaatgtgccaggcaccccagctagggagtttagatatttaatcctctcagctgccctgtaaaatagggattgtttaaaatggatttcgcccaccttataggcaaggaaactgaactacagtatggtaaagtggcttggctaatccacctggctagtgagaatggagccacagtgaacctggaggatactcttcacggcgttccatctttgtgtgccccacagcacaagcacaatgcccgggtcttaggaagagcttggtaaatgactgctgagttgagaatggtaggattcatgtaccaaaagggcatttggaaatgggcaaatgcccagatagggctctgaaagactagctatgtagagcaacagatggcaaatcatcaatttaaaactctgtcatccagccagtagcccgctggcctacagccagccatgtatgtacaagggctgacttgatcagctgtggctcttttatttcaggcaatccaccttccaaagaggtgcctgctgggaagtacccattcatagtcacttctgatgatgggcggaaggttcctgtagtccaggcctatgcttttggcaaatacctaggctatctgaagatcgagtttgatgaaagaggaaacgtcatctcttcccatggaaatcccattcttctaaacagcagcattcctgaaggtaagtgaagttcaggggaatgttccaccaatctaaaatttagatggctggatattttgctccttcccatttttttcctttaatgtttcaggaaaagactataatactgttgaagaatttagtttcttccttgagtttgccctcttcatggatagatttaaaacacacccaaatgccaaaagccccacttgcttcttcaagtcttctcagcatcagattccatacatcactgcttcctctgccttttaaaatcttgatcctgacatgccaaagccactctcagcttgtgtttacaggagagataactgaactaaaggggttctaattgggcagagcggggctcaagtcctggccccccaactagaggcagtgtgccttaggcaagttgcccaatctcatgggcctcagtttctttatcaaatgagggagtaccttatttatatgtctgagtctattgcgggatctggccagcagcccgcaatgcaatggggctctctctttgttcctaggcagattggcaggttgagaaataatagacacacacaagatagtgaaagctgggtccaggggggtcactgccttctggtcctgcggtgccaacaatgcactggatataccagcatttattattaagtttagtgagggcaggggtacgttagtgagggatttagggtcatttgattatgaggtgagatggtcacatggggatgaagtaattctttaacataacatttgtatgtagaagtacagtacatttgtatgtagaagtacagtatgagataagaatttacaatatagtgtgtgcgtcagtaatttctaacagagccttagaacagaaacacagtctttccataacctatgattagcaagatattaatcagcagtaacaattgcaacaaaaactggttacaaataatccatggaaacaggacatgaagctagataaccagttagaccagaaattctcagaggggagtacgccttaaccctaaagaggcctagaagagcggcggcaagatgagcgtgtttatagccctatcttatccatatggacaggccccccccatgcgtccgtttataggctccccacaagggtcacattccattcccagagctatgaacatctgcttttctgggataggaatcttggtgatgggaaacctccctgactgcacgtccatttgtaggctctctgcagggggaagcacatcacgtgctgttggctcattgtggcagtccaacctggcattgtctttacacaatcctgcatgcaattttgtatttacaataatcaggagcatttcatcttttattccgtagcaatagtttcagggcgtctccctacatgagtctcagagtaaaaatacatttttatatcattgattttcatatgtgtacagaacacactcctgtgcttgtctctcactttcccttttctgttgactatgatcatgtcaggaagatgaggtgcacagcacccaggtgagcctgtagtcacaacacagccctctcagtagccagatgggaaaggggcccaggaccacactgacagcgatagcccagctgtacctcagcaggccttttataactgcccctgggcctttcagagctcctaccgccaccactaatgctgtcccaggtgggccaatgggtagctcatacagatgtgatgagctggtagatgttcagaatattcttaaattaagatgcattccaggtcttattaccaggaaacaaaatagaagttcctaaggaaatttcatggtcaaaaccaaaatgcacacaaatatggtaaacaaatatgttctcacagcaagtaagatagatgatgtttcattccttttccagaatttagcccagtgtgagatttaattgtagggtaccttcttttctttcttctagatccaagcataaaagcagacattaacaaatggaggataaaattggataattattctacccaggaattagggaaaacaattgtctatctggatggctcctctcaatcatgccgctttagagaatgcaacatgggcaacctgatttgtgatgcaatggtaagtcatcagcaggagtggacatatgctagggaggaaggaaaggaagagggaagaggaaggaaggatgcgagaagggatagatcgatagctacagaatgagggatttcaaaacatttttagccagggtggtggcatgtgcctatagtcccagctactcgggaggcttaggtgggaagatggcttgagcccaggaggctgcagtgagctataattgcaccagtgcactccagcctgggcaaaagagcgagactctgtctctaaaattaaataaatatgaaaaataaataaaacattagtgcctaaacaaaagcctgatgtagcttcatactcagtaccttcttaaggtgctggaaggagatcaggtaaccaccaacatactgctttacaagaactaaaacctttattttaaggtgttcttagatgtctgaattttggatgttgctttccttttgtaagatgatgcaaatgcacaaactctgctaccctggagatatcaacataatagataaaagcatatctgtttggccagactgtttttcactcatctgttcacttgactccagagaaccctggccttgtgtgacaggaacctctttcacaggcacagaaagacaacacacagttttaatggtaataacaagtcctatggctgagcaagaccaggtatgaagaacaagcccgtctacttgtcaccaggcggaatggccatggtagctctctgggggccttactgagccaaggtctcctatgtcggactactacttccatgggctcacagcctgcacccagggaagtcatttctgtcagtgcttggcatgcattgcccagtgcccaggatacaactgcactcgataaatgtttgccgtgtaaatgacaacaatcatgctcatgccaagaccagactcatgatgtctcctcagcatcatgcagtcaatgccagagaagtagttaaggagaagctggtatataaatgttaagagaagtctggagggaaacaacccaggctgttggcagtgcttatccactctgttaaagaggctaggacaaaggagagcttttgctttttatttatttatttatttaattaattaatttatttatttattgagactgagtcttgctctgtcgcccaggctggagtgcagtggcatgatctcagctcactgcaacctccgtcccttgggttcaagcgattctcctgcttcagcctcccaagtagctgggattagaggtgtccactaccacacccagctaatttttgtatctttagtagagacggggtttcaccatgttggctagactggtctcgaactcctgaccttaggtgatccacctgccacagcctcccaaagtgctgggatttacaggtgtgagccactatgcctggccttttttttttttttttttcggctttttgtctcctaaatgagaatatattcattttatttcttataactaaacatatattttgtaaaataaaagtaagaatggatgtgattctccccagcttcaaaaggctgtctctgtctttccaaaattgccaacttgggaatcagctgcagacatagacgtggaggccaggttctctttggcatgaggtctggtgttgagcaggctctagggccaagccctcagaatcaggcagagggcatggcctgccctggagaagcctgtgcaggagtgactctgcaggccaccttgcatgggaggcccagtcccgacaccagggctacaaccgagagaccattttgctaaggccacctggcctgacagtatgggagttttaggagggggaaataagagtttgacatggactggtaacagtatatttttacttctgggagcataaaattagttctaattatagttgagagatccctgggaacacagcagcaggtgaaaagcagctttatttcctcactagagctaaccagattcctggagctgatcctaaggaagaagagccagagtaactagtgtaaatctgtgctactgttgcagattaacaacaacctgagacacacggatgaaatgttctggaaccacgtatccatgtgcattttaaatggaggtggtatccggtcgcccattgatgaacgcaacaatggtatgctcccaggcccagctcctcagtgtgtcatgttctctctctgatctccttttctgttatggttcttgccctgaacacacccatgtgcagcctcagttcatctctgctgccagccatgtaccagaatgtcagtcctttaaattagggttagccattattaaagtctaaaacctagcctgaaggacacacacaagcttgtgtgttcttatatgtattcacacacagaagctgcaggtaaggttagtggaactcaaacttggtctgaatttctgacttacaaagctatactagttgtttctgatttatgcaaaataacaacagtcaccaccttggcatctgaaaagagacaaaatcaccaatcttctgtcctgaaaaagacataccactggattaaaatgttaccttagtatatttacagatatccaagattatatcatatggcaaaacaaatcaactacacaaatactcaagacactcttgtagccctccctgatttactgtgaaaaccaatcagtatcagtataaggccccaaacgcatcccattgtcagacaacagggacaggttgcaggggcacattgtttgtctggaggaacggaacaatgcaaaacaaactactggagatccagccccaagctagcagatctaagactgagcatggtgaacttctgaggcacagccatttgtgagctcccgccatcttgcccagtggtggagtgcagggccagaggcctcctaaactcattcccttcctcagtgtcaggaaccacttagacatagctaatgatgctctataagcttcccatgtccccctcatttcttcccccagcgctgagggaaactggtcatggtgtaagcattttctcaagctattttccttcttgcctcatctgtgactaccctcaggcacaattacctgggagaacctggctgctgtattgccctttggaggcacatttgacctagtccagttaaaaggttccaccctgaagaaggcctttgagcatagcgtgcaccgctacggccagtccactggagagttcctgcaggtgggcggtaagtcacccatcctgtagggctggcccatccaaagtgacatggcatttcctgctggttggctcagcttccccttcaccaaaattcctgtggtcaaactggtttggatttttcccgacccaacaccaataccttaccctttaatggctgtggactctcagagccactaagattaggttggggtcaaagccccaaagccccaaagccctggcaataagcagtatttgccaagtctgatttggacatcagatgggccctctaagcaggtcacctgctttgaggtctagtttctaataaaatcttatttaagcattcaattattttttttttaaatcctctcctctgttctactcatcgttgcctggaaccatgccaagatttaaaggaatgctgtccaatctgtattaaccaggatgattcctggaaggagcagcctactgcacagacatacctgaacacctggttctagtcccactgtgacctggggcaagttctcaacccctctgggcacagggagaaaacctttcctgtttatctcatggactgcagtgaaagttgaatggaaataaatgcttcctaaattgccaagggcttctgaaacacttttgttaataattccacagtccagtgaattaatcctttaaaagcaatcttattttacctggaaatcataatctggcctcatttttttaaccttaggttgtggtcccgcttgacagatagaattgctttcctgagttttcctctgcagaacacattgctgttgagactgaagggctacagaaggcagtggggccctgtcctaatgcctatggggcaacccaaacatcctccattttcccagaagggagttgagggaaaagcagttttctgatgctctagcaaagcactgcatagctctatgccttgtggaagtcaccaaatcccaaatgattaccatttaatggtcttcaaaattgtaaaatgctctctgcctctgatctgtttctcactttctaaggccattgaatcaatttagtagaccaattcagcattttaagggaaaaacagaaaaagatgtggttttgtccatgtagagtcaccctttgcctattctggtccagagctggttttccttccagtggttctcatatgtcctgtaaggactcaaggataaagggtggctgcaatgtcacaattctcttgacaaaatttcactcaggtttaaaccaaaggaaaaaccacagccccatgccccaattgtagagtttggccaaaattccttaggaaacagaaatctccctttggatctggtgaaaacagattcatttcttttctaggaatccatgtggtgtatgatctttcccgaaaacctggagacagagtagtcaaattagatgttctttgcaccaagtgtcgagtgcccagttatgaccctctcaaaatggacgaggtatataaggtgatcctcccaaacttcctggccaatggtggagatgggttccagatgataaaagatgaattattaagacatgactctggtaagcatgactgtctcttcctttctctaaagaacaacaaaattgggccaagaaggggagctactagtggtgccaggagggcaaagtgactccctgtattgctgactccctcctgctttgcttgttggaaagcagcagcacagcacagcagagaggaatatgtaccctgtcaatccccgagcacacacatgccttcatccaaccccagagacaaaacatttgtaaatcaaaaatgttttaaaattcttttaactacatctaagcagctatttaaattgtgaaatataagtgagttttgcattaacagaaatatcacacctctggaattttaggatatggaaaaccatcacattaaatcatttaaattttctttcttgaagaagtttctgtgtgaatcagtcaggtagaagtggatggggtgagcgccgccctttcagcacagtgggttggtggtacaaatcataggaataaccatacttgatgtcagttggtacttctggcagcattgagggacattatatgccagcctcacttttagaaattctgttgagagtcacattatgtgcatacagaccactgacataggacacacttccccttcctcttcctagggcagagaccagcatgcttacaagacacacaagcagcttcttggcatctctgggtagttccaccaggatcttcctcagtcttatcatgctggacctgtcattttagctacttattccaaggagcgtggagggcaggaccagaccaaaggaggcagcccttcctgggaggaaaggtgctggcttcttctgtcccttccgtgacagaagatggaagggcaggcgtaaaagccccatgagacaaagaggctgatagccatcagctgtccaccactcaagcctagactgaaggatgttagagagaggagctcatgcagaaggctaaggaagccctggacctaagcgttctcaacactggttatacattagaatcacttcaggagcattttaaattaaataccaatggctcggccgcagctcttaagagattctaagttaactggattggggctaaactctttttcagtgattctagtgtacacccagaggtgaaaaccactgaagagagaagggttcttaagtactggagtgatatttttaaaataaaattctgttgggttcccaacagaacatgggttcccaacaaacatgggtttgttgtagctataggcaattagcatttatcctctcctctctttggtaaaggaaatcccccaagtcccatcatcaattacatgaaaataattattgggcaggcaaacaaaaggaagccagttttatctctcaactaattgctcttgacccagttccctaatgcccttgttctggagtggttcaaaggctatgatgtcaatgacctctttctagagtcatcacagagctgaggcaactctacttcccccaattacccaatattgaacaacagacacattttacatctggagcatgaaaaagcaatcaaattctttgtacttatgatcactagcgttcttgtcttctgtgacactttacccctgcttatgaaattgcttcccttttataattacaaaggactaccttactgttgattgataattaccttttctgtagttaaaataatgtatatgtttttctaggtgaccaagatatcaacgtggtttctacatatatctccaaaatgaaagtaatttatccagcagttgaaggtcggatcaagttttccacaggaagtcactgccatggaagcttttctttaatatttctttcactttgggcagtgatctttgttttataccaatagccaaaaattctccttgcctttaatgtgtgaaactgcattttttcaagtgagattcaaatctgccttttaggacctggctttgtgacagcaaaaaccatctttacaggctcctagaagctgaaggttagagcattataaaatgaagagacagacatgattactcagggtcagcaacctagtgagttagaaaaaaaattaacatagggccctataaggagaaagccaactatgttaagtttacgtgtccaaattttaatgaaattttactaacaattttaaaccatatttttcttcttcatatccatttctaatccatcaaacagcttatgtttacataaaattttatcattcacaaggaagttttaagcacactgtctcatttgatatccacaacttatttttggtaggaaagagagatgtttttcccacctgtcagatgaaaaaactgaagctcaaaaagggttgacttgaccatacagctaatgctgacagatccaagacctagacctaggtcttttgaactcaagtccagcattctcaactatatcaagttactgttcagaatacttaatatctcctctcttcataattatcaatagccccaagctcatggatgacaaatctctgctttatttcttgtctctattttttcactttatagctcctgttataatagcaagtttaatggtataaacacaggataccatcctctcttgcaacacccatgtgcctttgatgagtcaggtagcaagctgtagtagataatgagaaaggccagaggctgcaaaagacagtcaaaggacacgagagaaaggaaggggaagaacaggactccaggactgttttatattatagaaaagcaagagctaaagagcatttacacatgttaaacagatacttgttaagcatagtgcctgacacacggcattagctgttattttatgagattccatcagctctgcctctgtcctctttcttctaacatgaaggtatcatgagaagagaaccttctaacataagctgtaattctaaacctgcacttgtccctctccagcaagaggctagcactgaattcattctactcatactacacacccagttatggaatgtccagagttctcgaagaaaataaatgactttaggaagaggtatacattttttaagtcgctctgcctccaaatctgaacagtcactgtaaatcattcttaagcccagatatgagaacttctgctggaaagtgggaccctctgagtgggtggtcagaaaatacccatgctgatgaaatgacctatgcccaaagaacaaatacttaacgtgggagtggaaccacatgagcctgctcagctctgcataagtaattcaagaaatgggaggcttcaccttaaaaacagtgtgcaaatggcagctagaggttttgataggaagtatgtttgtttcttagtgtttacaaatattaagtactcttgatacaaaatatacttttaaacttcataacctttttataaaagttgttgcagcaaaataatagcctcggttctatgcatatatggattagctataaaaaatgtcaataagattgtacaaggaaaattagagaaagtcacatttagggtttattttttacacttggccagtaaaatagggtaaatcctattagaattttttaaagaactttttttaagtttcctaaatctgtgtgtgtattgtgaagtggtataagaaatgactttgaaccactttgcaattgtagattcccaacaataaaattgaagataagctc

SEQ ID NO: 55 - DNA, 33445 bp, Homo sapiens
  source 1..33445: mol_type = genomic DNA
attggaagaagaagcatagtatagaagaaaggcaaacacaacacattcaacctctgccaccatggggaactgggctgtgaatgaggggctctccatttttgtcattgtaagtaccaacaagagataagttataaattctctgacttctcggggttatcttggaactaaaatagaccaaagcttttttgttcatttgaggaattgtgttgaaactgatttaccatgtgaacctatatctatctgtaaacagactgagtccattcttccaaattccttaatggaaagaacatatctgggggctcacttctagcttacttctgaattcctaggaggaataaattagccagcatttcgcagaaggagtagaaaatatttcatgctaatgatctctgattctgagttgtttagtaatgtttactcagacgcacatgtctatgtgtttatactactttaaaaatgacaaattgaaattttataccattttctaaataaaaaatataagattgactcatgtatgggaagtaggcctttatttcagtaattacactaaatataataaaacttctcaaatttattttcaaaaacaagtaccttcttttttcagagatctaaacttgagttatttataagatttataaaaattcaaaagaacagaattgaaataagtcatctagattcataaatatgtagtatgtatatttatatataattgtatatatatataaatcaatatagtctggagaaactatgtaagtaaagatatagctaatttacaagtggacagaatgatttctgtactttttaaaacaaagaaaatcaactgttctcttaaaatggtgttatcagcaaagcaataatggacaaattgggtagatagaaatacgatttttaaatagcctttctaaataaccaatagaagcattacacagatgttaaaaagtacaattatgaatggaatatgaatggagcttttgtaaaaatttatcatgaaaaataatgagtctttgagttttaaatatagaaagcaattagtggcacaaataaaaacaacaaatattttgttataaaaaatgtttacgccaaaccaacattctactgcaacagagaattcttccgagtattcgaagctgtaaacttaacttcttatcaccatttttaagggcaaataatttctatagaaagtaagttcaaattaaacttttagctctcgccacaatttttcccaggaaatgacctccttctaaattatatactcatgcacttgaaagtgaaaacacagcttggaaagtcagagtaaagaaagaatgacaagatcaggaaattgggaagttgctttagcacttttttctttgtaaagagagaatattatcaagtgtctagagcatataatagcttcaaagcatagttgagaaaagatcactatggagctgaaggtagagaactgggtagtgtgaccacttgatccagtcagtgcttaggataaaatgaactgtcatgatctagaaagctgtttttgttgtaaatcccaagcccctcactatgctcaatattctctccttgaagcattaagtaaaactaatcaaggaaaatggaaggcttggcattttagctgatgagaattcactagctggattactgtgtggtagagggaggtgattagcacctgtgagaacagaacgcagtgtcatactggtggagggaaagcaatagtaatatgttcccttcctttctcattttaagtggagtggcctgctatcagctacctatccaaggttaagcaaaagagaggggaaaaaaagggagtggggtaatgtaagactgataatttggtatactggccaaatcataaaacaatcatggggaacaacacagggtggagaggttttaattatagacaagtgtagtgacactgttgaggaaagagctggctctaagctggttatatccagctttgtcactacctttgtcaaagttggacttggggaagtcctgacccttatctgactccagtcttgtgtggaatctactgtggaaatgcggaaacttcatgcaattatttctgtttgtgcagctggtttggctggggttgaacgtcttcctctttgtctggtattaccgggtttatgatattccacctaagttcttttacacaagaaaacttcttggggtaagtataaattccatcccatgcaatattggctggttcacatttctcatcagacattcttgttcatcttcctgttagcattttaaatacatattctgaccaacccaaacagtaccattagcctcactccctccattgcaacttcctgggcaacagtcacttaaagccttccagtctgggaccaacaaaagtggggcagagggccccagtggcatccttccccaaccaagaaccatgtgccattgtttagcttaaaggagaaatctaatactcactctgaaatggaagggcaggttggagcaatccatccaggagtgacacatgtgggacaagtgggactttccatattttctaagtcacctaattcctagtacttttttgcatgaagagctctgctcctaatcacatgttatgaaatgatcttcagaaaataaatctctctctacatataaagactcgaggaacttgctcaagggccacatctgttgactaggacagtagagtgaaggcccttcagtttccttgggtcctttagtattctgagtttccttgaactgtcaggcctcttgcctccagaagacatctgttacatcatgctgaaactatgaattaattgcttaatattaattattataagtattataaatcataaataaataattttagcatataattatgctagatcattataattgttgttagcttattcacattgatgctttctcccgccaaaatatgcaacttctttagacattacaaatataataattataatgccaaagcattataccataccaatttaagatactgttaagatcaatttaagtgctaagaaaatatttaaaatctttaaaagtcttgatacttaactctagttaatgatatgcaccttaagtgttaaagagaaagtgaactgttgtctgtaacttactttgaaatgcatcaaaaattagatgagttgatggatggatacaggaatggatagatagaatgtgataaagcaagcataaaaggtataatctgggagatgaataaacaggtatttattgtaaatttccttcaacttgtctttatgtttgaacattttaataataaaatgttgaattagggcaaaaggtcaatttcagatgaaaacaaagggtcctagctagccctaaaggaaaaccgttggctctgaaggaccttcctgtacagatcacttggtgtctctggtgtgtggcctcatgctaagaaccttggggaagtggggacagggcatattctgtgctcaaaaaagtcactctgctccctttcccgcctcttctagtcagcactggcactggccagggcccctgcagcctgcctgaatttcaactgcatgctgattctcttgccagtctgtcgaaatctgctgtccttcctcaggggttccagtgcggtaagagaaaatgttttactaagttcctctaattttcaaaggccatcaagcaaaatgcccttttttaggtaaaaacaaatgaatgatttgggaggattccagcttctgtagaatactcatgagccaagccattatctagtatatttctgtgctatttggggatggagctccctaagacaactatttggaaaacaaattttgaaaaaacacacaaaaccacctatacctcaacagtagcaatgaagtagcacacacgtacacgtttacacacacacacatatatatatgatagatatgcatatatacagagctttaggaagttgacatgtgatatctgggagttaatctttcagtgtcattcaaaaaaatttaagtcagaggaaatatcttctgtggataatatctcaaggagatggagtcaatggacagagtcacactataatgaatgtaaccaagaagtgttggcttcatggaactggggagcatagagctttctaaatgtccagaattcctttgactctcactccaacaatttagtaagccactaaatgtactgtgctagaagggggaaaaaataagtaggaagaatctctgtaacccataaaatggtatacaaatttcttactagtattattgtacaaagatgacaaacaaggaacttaaaatctacaagtgtactcaaataaatattatacaaagcaaaatatgatgggttccacaaagctttacaaataaaatactatggggaagcaagagagaagttgtgtcaggtggggcagagaatgaagaagggcattttagagaaggtgacattagagatgagtatataaaaataagcttctaagaggtgtaaaggagagagaaaggcattctatgtggagaagatggcatggacagaagcacaggaaatagtgaggaaatcgtattcttgaaggccaagaattggcatagccttggcttctctttgtattattattataaatatttttttgccacctgtgaccacaccaaagagggtagctgggaaaaaagtagggattggtgtcctggtgggaccaattccgtggttcattaatgactagtagcttctaggttttttttaaaaaataaaaggtatagtaagctttttgaaaaaaatacttattaagtagagatcacttatggaggacagcagaaagcaaactacttttgtgggaatgtagggattgtacagggcagatgcctgacataaggctggagaaaagaggtaggattttactggtaaactagaactgcatatgtatagttgaggagttcatgcttaatttggcaattacagaatatttgaaggaggcagtgaactaaactgtaataacaagcataacttgccttgaactctgcctcatttttcctagttacactaaattcatgctgatccagagaatttttttctttaagaacatataacattcaatttactaatataggactagaggctataatttagcttttattttatgacttaactatttacaaaataccatttcatcttaaaccaactgccaaaattgggctctcacaaatctaaagtacaagttggcagaaataactgttacaccttcgcttcctcagaaaaagaagaatgttgataaccaatttaagatgttccagaaagagtcgtgatatcttcctctgaaaaattctgtgatgaggttcctttccttaagccataaattctatgctacgcaatgttgtcttgcaaactgagagctaaccaaaaccaaaaactaacaacagtacttggtattaaacattgattacaaggatttccaaaaaatcttccaaatttaagaaatcacagaggtaaaattacactcaattgaaagttttattaatgagccacctattgtaaagtataacgtttaatatatcgtaagtgcccagtgaacatttgctaaatgaagcccatgcactatagcttatttttgagttgggttctctatcacccaggctggagtgcagtggtacgatcatagctcactgcagcctggaactcctgggctcaagtgatcatccctccttgacttccatacatgtggggattacaggcatgagtcacctgcctggcgagttccttgtttctaaggagacacaattcatttttattctccctacccccattagaatagtttctatttagaggaagtaaagcctgagaaacaggcaatgttttcaccaagatggcctgttaagaaatcttggttagtctacaagtccaaatttcactgccggtgagcaccatgtcccatgagcagcacatgttgtaatgccagcttttatgcctcctgtgacccaggagggaagatctgcatgagagtctctaaagacagggatgaaatgagactgcccttcaaatcgcagagaagcttggctgtataactacatagatctttatataaaagaatatgttttaaaactatcagcaagcaacattcttttatagatcaagcatgtactttcttctgggattcctaacctgaaatgtgaacttttctaataaaacttcttctgtgattgtgattaaaatgagtgagtgtgctgtaactaatgttggaaatcatatagctgccactcattgaagcttaatggaattcaccgcatgaaatctgcacatcaaaccagtaaagtgggaacaaaattaaatggaagtgttggcattcaaacccaggtcattgtgtccccagagcccattcactttaaatcatgctgccaaaacttcttgaaattgtgctgttgcagtattatgatcctagaaagccattatatatatgagtgtttgagcatgccaagtaacctagactagaaatgacaaggatgttataaatacaaggacttaatagtaggacactatataagcaaaataaccacgaacttgcattcagtttctagaggtctcaatcattgaaactttgctttgtaatccttctggttacctagagaaagaaagccccagggttgcccaccccaccactccaggaaaggtaggggtaaaggctctcagactgctttgttgagaaaaatggagaatgggtgaagctcagcacacaaaaatctctgaggaagccttaaaaacccccaacttgccatgcagaaactaatttctgtctggatggcagtcctagtcttaagatcagaaagaaacaggaaggtgagagggtgaggttttatctgttaccttatatagtctgggagtcagaggcactcagtgtgcctctatctttaatcacgtggtctagcactagtctcttgggctttctgtctcatagtttttttttttagttgaaaaacaggtcaactaacacaaatgtaagaaggcatatgttggtctaaaagtatattaattgtttaagtctgtcaattagtgagttgtcagtcaataaatatttgttgagtgccatttatgtgctaagcactggggacatgtggtaagtaaagattaagttatagataggccatgagcttaaggagcttagagtgttaacaggagagacagagaataaatatggaacttccaaattataaacagtgctatgcaaataaggtagtgttattcatatttatcagatattctactgccagcaggtgtggatattactgtcaacttacttgcctgagttctgtagattcaaagttggattttgtaatttctcccagttgcgtataaatatctaaatcagatacattgatggtgcgtgtggtgagatcaagtgtacaaaaagtagagcttttgagtttctgtaaagtgttacaccccataaaatatgtacttctttttagttccacttcccattttcttgaaatatttttttcttactcagtttcaatagagcatagaaatctgctgaagtgactcaataatctcccttgcattagaatggtagtttattgaaatcgggcaaggcttccggtgacagtaacagagaaacttccctttagaagtcaatggcagaaagtaaagtaagttagtaaggaagctatggggcatgatggcaacgtggataattgggaagtggctggcaataatttagaagtaactcaaagcatataaatgcaatctgcctgatgatggggaacaaaaaattatgggcagtcacagacagtaaagtccttccttcctatgccaccaaccggttgtctcgcctccttttttaaggaagtggtgaggagatggtattcttaaaagcccagtatcagcatgacttgtggcttctttttggatttgtttgccattcctgtccacaccaaagagggtaggtgggaaaaattagggatttgtgccctgatggttggacccactccactgatccattagttactagtaatctcactttttcctttcaatataatatatgtgttttacattaactagctttttaaaaattacctattaagatgaaacagagtatcattgaatggacaatgtatttcccaatcacatctctccactgttctggctttcagttaatttttctctaaggatctacagttaaagctatcagggggcatcaacatatattattttacattttttatgatccatggtgattatgatgataaggataggactatgaagacagtgtatgttccacaacaaaaccatattcgtttgctttaaattcggcgtgcaggagccagtgaattttccccaaaaaatttcaaaaggatttgtcaacaaatagaaaagaacagtgtgtggcaagtatagacatgggggtaaattcatctctataggtttagtatgatcatctccagttccagggcatgaaaatgtacttcatttatgcagccaaataatgattaaaagatttttttaagtacatgacatactgtttttcacacaggaagcttacctgctagctggggagtgcagccttactaactgaaaacttaaataatgatactaaataacatcaaatattgattaaatacctgtcaatgaatatatgcaatagggatttgagggactaactatgataattatacaggtgaggaaactggagactgagtatgttgttcgatgtcacacggctaggtgggaggactgggacccaacataggtatatctgaagacaaaacttgctctgaaatgtgtaattcagtactgctttccaaccctactaattctcattctctgattctttggactccaacctagtttcaccactcctgtaaggactgtatcaatcatctatcgtgtaacaaattaccacaataacttaaaacaacccctgtttattagtttacagttctgtaggtcacaagtccagcacccagttgctgggttctctgctcagagtatcataagactgaaatcaaggtgttttctgggctgaattcccacctggaaactctaagtaaaaaccctcttccaagctcattcttgttggcagaattcagttcattacagatgtagcactagaggtccctgtttccttgctggtgatcatctagggtccactcaaatcctagatgttcctgcattccctgccacatgccctcctccaccttccaaccagcagcagtgcttcaaatctctgacttcctccatctctgacttctaaacccagatttaaagagttcatgtgattgggtttgttggcccagataatctccctattaaagtcaacttgggactttacctctgcaaaatcccttttgccatataatgtaacaaaatcacagagtgatgtctcatcattttcacaggtccaaactcaaggggaggagattatataagtcattgggggtcattctagaattctgtctaccacaaggactctcagaaactatagaggaaattaagttgaaatttaagaagccaaagaaagaaagaaggaaagaaagaaagaaagagaaagaaagaaaggaagaaagaaagaaagaaaataaataaataaataaataaataaactataaaggaacatggcaattgggaaacaggaaaaagttatttcctcaaaattttaaggaatacaaagtagaaaataattttcagcacttgtaatgaacacaaaagacaaggaggctatataagaaaacaaagatggtcaacttttcaacaacagatcagtaaaatgtattttacaaataaatttttatttcaaaaacattaagtttgaaaatttgtattttacaagtttttatttcaaataggaaaccattgttttgagagtctgagtcattgctcagctccactggtgaacatttaattataaccaatgcattggtgctccaccatattccctaagcactggcacttccaatccatgcgacaactgccctttgcaagcatcattcactctctgcctggggattttctttcagctttctcctggggcaagcctgaaatcccaggggattgatgtcctgagagcatccctcagagcagccctcagccaatcatggatggcagttggtggttgaacacccaagcttcttaacccgttaggtaaaaaccaaagaacgaaacaaacaaagtaaatgaataaaaaaccctttgggataagttctacacagtctcccagagttccctggtgtgatcgagcccaatgatatgatatgatcatggtagctgatataataatgcactcttcattaatttccttcccagtctcatttttaccctcgttttctatgaccaccttccggatagaatacttacacttaaattcttgtcacaggtttctaggcacttagaataatagtgactatattcctgcatttggtttggtagaaaagggcattaaccttttatagacaaatagacttggatcccagccaatgtgcaattttagctttagttttcttacctgtaaaatgaggacattaagatttaccttgttgcattaaatgagtaatgattatgggtaaactacctagttcacagaaggaattcaataaagcataatttttttatttttcctttttctggaatcctcagtgtcttccttgctactatttctgtaatttcaagaacctgacctcatggtttaaacttcctgccctccctagttatggctaactgagagatagatggtggagtaagcacaattttctgtgcaattatattttctacaaaatcagagtattttattaaaaataagtaagccaaatattaaacacccctatatttaaattgaataaaacatttagaaccaaatattttaagtacataaattttctttggtacttcactctcttgttcttaaagttccctgaatctctgtgacagtgcatttagactatggaacaaagcaaccagagcaagacattggccagttttcaggagagccaagctctaattcaaccataaatcagtttaaatcagtttttttctttctttgagcattggcacgaattgagattcaaactcacattttctaacatatgtaggttcgtcaaatacactaaaatactgagtacaatagtatttttaatgccaaaggaaatcatgtaaagtatgaaatatcagaatgtttatataaactctagtatcagatggcctgagtttaaatcccagctctgcaacttattagctgtgtgacctaaggctaggtaaactctctatccctttgttttctcatctgttatgtagtaataataatggtacctcccttgtaccattattgtaagaattaaagagttaatttgattattacattaaagattaaattaaattaaatattacatcaattacattaaagattaatgtaagaattaaattagtcaatgcatgtaaaacagttgcagaagctcttggtaaatgttagctattgttattttggctattagcatttggtcaatgatctcccctgtgatgttgttcacctacatgggcaggtgtacccttctttctcctctcatagtgtgtatgtcctagaacagtgttgtttgaaaactattcacttgttctagaactgttcacttgtctgtgtccccacttgactatgaggtatgtgatgttaatttctacatcctttgtttaatgagtaaattaatcagaactagaaactatgtagctagatatgttttttgtacaagtttatatttttatacagttaagcaatggattccagaggagactttatgtcaccagtatgagaacagaaaacataccagttaagccagccatgtcacttactggctgtttgacctgaggaagatgactgcatctctctgaacctcagtttcctcatttatcaaatagatataatgatacagtttgcagggtggtcatgaaaattaaatgagataatatgtatcaaatgtttgacacatagcaagctttcctgttaacaattactattccattctttcccccttaatccaaagtgctgctcaacaagagttcgaagacaactggacaggaatctcacctttcataaaatggtggcatggatgattgcacttcactctggtaagtttattaaagaaaacttggaaccagggagttccctctattcatagatacctttttatataggagatcaaccagttttatagttagattaagtggtggttggatatgttgtatttttttaatgagttttgctcaaaagtatttaccacactttctgccacttcaatattaggatttattcctttaggttttaaagcatttttatttcaggattttcctataaaaatgaaaatatgccatcagaaaagtcaatcctagtgtcctcaccctttgctattctttctagtgtcaaaaatgttaattcactcatgaaaacttatttattctaaaaaaagttcttggttgcacgtgtgaatttgtggactttttgcagcaaacctacaggagccatagcccataaattgagaatccctcaagacggtcattatcagctaaataccttcattattattattactattgttattgttattgcatgtatccatacaatggatatatatgtgtgtatatagatattatatgttattattaaaattattagggtggtagtgtcagtgcaagaagggctgtatttgggacccttatctaattccactaattcactcaacaaatcattcatgtgccagagaatatataagcacagtgataaagcagacttgtactctgcccttaaaaagtctgttcctagcctgagtaaaataggcttagattacaggcatttaactgagtttctcttctactagtagatctggcaggcttttttagcagtggcaaataaatagttcaaaagaaatatatgataaaatcttgttagaaactggcatagtgtacggattaagagcacatatttgcgtgccagaggtactggatttgattcttaactctgctgcttcctagcttgatgaccttgaacaaggttttaaagcagtctatgtcccagcttcctcacctgtaagatgagctgatattaatagtacctacatcattgagtcaatgtaaggattaagtcattgtgaagtacttataacagtacttggcatctagtaagccctatgtaagtgtttattaataaagaatgcaatttttaagacagagagattcataccttatggccataggtttgtatcaattcaatcaaatttgtcatctctctctggaggtaatttcagagtcaggttaatgggccagcaattaggcattcattacatgagtgttttcttgtttgagcccaaatatattatggagagagataatgagagcatatctaaacaccttcagaaactaaggctattgtgtagaatcttataacttgattgagtctttaggagcatatagctcaacatcttcatcttacaaattaggaaaccaagaccagagagttaagtcattttcccacaattacacaactagagaggatcttacccactagaattgccttgtctccttggttctggagacccagttcttgtctataagtgtcctgggcctccctttgtctccctgtggcttatcatagagtcagaggctgtcccagaaacccagcttacaataaatttgttcatacccttcattctctttgtttctcttctctgcccttttcagcgattcacaccattgcacatctatttaatgtggaatggtgtgtgaatgcccgagtcaataattctgatccttattcagtagcactctctgaacttggagacaggcaaaatgaaagttatctcaattttgctcgaaagagaataaaggtaagcctctcattatctgacttagatattctctaggccattacaattgaggactagatttcagtgagtgaagacctctcctttgccaaaaaaaaaaaaagttggctaaccatcagagggacaagtctgtaggttacaataatgggagtatagaaaaaaatgtctcccacactcctcacctcatgtgtggaggtctctagatgttttccaggtctttaagctcatccatgagaatgtgtgcatgtgaagcctggagtaactcaggcttacctgtgactatgcccaccagtcaaagaaagctgggaacacatgtctagtcgaacaaggtttggtttattacttgctacagcaaaagaaatctcacaccttgaggaactctgggcatctcaaggggatgtaaagtggatttagaatttaggattctgttagatggtttgggggaggatttaagaatgcaaggattttctctggatcagttatggtcaggaattgggggtagttctcagataaggtatcttaattattttttctaggaggcagagggaacagaataggactaagtctataataggcaaagaagcagtagtcattgtctaggctcagacatgattttggagtggttttgcttttatctcactccatcacagtcacagagtgacctcctcagaagctggtgttttgtgaaattatttatgtgaagtagggaacatcctggcctaagtattagtgtaaggccagccaccagctgacagttgtgtgatgcctttttcttttcttaccaacaacatctgagggatggcctgtgtctacagattgtcattccttgagaagcacatgtgcactgggagtaactcagcatttctctaggggtagccaggagggtatccagaagtaagaacttcttctatcccagcagttgttgaagcttcctacactcaaagacagaagctccaagtcttcatgcacccaatgacttgggaagatgactaaatcacattaatatgcactgaattctaaaaatgttttcttgtgtttagaaaacatccttagttttggaaaaaataattattattctcagacttacatgagaaaaacttgcctgatatacttagggagggaattaaacagcatcataaaaaacagattttttctacaatatattgggtaatttttcttttacattattcattgtttgcccaatgatatatgagggtggcaacattaacataactaggtaaatctacactatcatgctctattcagttgttcctggatcacttttactgtatctatgctctcctactcttctaaatgttttcattttcaataacctgtaactgtttcctcctcagaggactgccctggggctactaaagtcccttttctcacaggctcagagatcttggaaggttggtggggggtggctgaatggttacctgttcctgtgcaaaccgttagccaataactggtggatgcagactatgaaacctggcttccttgccttgagacaggataaactctaagttgtaacttaccctccagagttgccttgcaggatcaggctgaagctatcccctgtgagactgcctgatttcacccccttgcttgacttgtttgtcttttctatcctattccctactctcttaccagtttctcttggagcacatgttttctaagtcacttgcccatgaagtctcatctcaggatctgcttctggggagcacagctgatgatgttcagcattcccagaatatatttgcaaactaagcactgtggccctttcaaaatcaaagggagaaagagccttcagacacttttaggacatcctgtagttgattgatttcctttattttctacccccttagaaataactatttaagtacatcagttcacatttcctatgacatcttaaccatgtaagacattttaaaatttagaaacatctatttcaaatctatatctgtctgtgagggatgattaggattattcaaagagggggtgaaaatatctattgttctatacattggacactttataatagtcctgcatttgagaacctataatattgtgcttgcgcacatgtgtgtgtgtgtgtgtgtgtgtgtgtgtgtgtgtgtgtgtgtgtgtttatattttacagaaccctgaaggaggcctgtacctggctgtgaccctgttggcaggcatcactggagttgtcatcacgctgtgcctcatattaattatcacttcctccaccaaaaccatccggaggtcttactttgaagtcttttggtacacacatcatctctttgtgatcttcttcattggccttgccatccatggagctgagtgagtgtttaaattctgaagtgaaggatttcatgtccctcaatttctaggcaggatgctccattagaggcacagtgacctccttgcctgtgtgtggttagcctgtctgctaagggaatgtgagaggatagcagaggtcagtttgatagaaaccagtcaacattggcatttttgtttcatgcacccatgtaattgctattcatggtgaagttatatatagcaagcttgaaaaatacaccaaagtctgagtatctttgcaaatgtataaaacatattgagagcactggtaggatctggaacatctgcaatgatatcctctatggtttaatcactagtaaattaaacaaacctccagactagaagagttaatgattaatcagttgaagaggtttgttatagttcaataagttttgatttaagcccacagtcatttatttgttgtctaccatgtatgaggacctatctcaggcactgcaggaaatacaagcaggaaaaatatgtggttgttgccttcaaacattctaatataatgaaagtagcagctaacttctattaagggtctgtgctaagggtttgacatgatatatttcttttaacccccaaaatgtatagatttctcactatcaccatttcttggggatagtaattgcagacaagaaacctggagctaaaatgttaaaatatgcagcctaagccacctctctggtaagtggcccagctgagattggagccaggcagtctaaagcaggctgtgataaatgttctcttagagacacacagttcctggctatgtggttaggagagtttgcctgattggagatcctctttcataccaagtttccttttttgtgcagtttcataccacctgcacacaaaggcaggcctggggaagttccctggtgggtatagggctccaggaaattagggttggaggaagtagaagctcaagactcactctgcccagagcccagttggtggccaagacatgactgtgaaaaaggggaagggtggggaaagctgcattgggcactgcattcttaaactacttgctgactgtgacccctgataaactctttgtaagcatggagaaatcaatggagaccaagaatctgatgactctcttaaagcactcaaatatctttaaatgggacttagtcataatcccgtgtttcaggtaatcctagagaagagaaataatttcttcccctctccaatttagtaattccaccactttctgtttgtatggtttcgcagatactcatcttcctttgaagcagacagaggagatatgtttatctccttctccacttgaagagaatctgctctttacactggttaggtgatttctcacagtctcatggctccgtagcagctgaattgggtttaaaatgcaggtttctggactcctggtcctggcattgagaagagaaggagaaaatcagattattttcctatcatttacttaccatgggaacttaggcattttgaactttaatagttattttttggactcttactttgtgtctggcattttttatacatcatgcaaattgcttattataatgaacctttaatgaggtactattacatctgttttacagctgaaggaactgaggctcagaagaagttaaataatttgcctgagtccaccaaactagtaaggggtagaaatgagatttgaacccaagtctgtctgacacaaaacacaattgttttcaccaaaacattctgctttgagttactaaatcattctgatttacattctcatgtaaaatgggggtaataatacttgcctctcaggcttgtcatgaggattaactgagataatttgtgtaaaatgactttccccaagcctggcacatgataagtgctcaatacatgataattctcttccccaagacctaaggatagaaaggagtggttaatgaacttgaattaaaacattctcagaatacaccaaatgacacaataaattttaggtctccaaaacaaacctttacaatgggttttctgtgtcttttcttcttatatattctgaagatgctgtcatttatgttccttgaagtctactcaacgttgggccttcctctctctatcaccaataattgtcttatgatttggtagttgctcaactagcatttattgaattgaaatgaatgggctctgagcaattcaaggtacacactattagtgttgatgtctgtgagaatgttataatccctatatagttaagtatctcaaactggtttcaaaatttggtttgatttagataatttccaaacccacaaataaggcacttcttgtaagcttcagggctactgtatatgactgtctcagttgtctactatagtgggtgcctggccaaggacaataaagttagcccacactttgatgattgagccctttgcttatatcttcataggaagggtaccattttctaatttgcacaaaggcactgtaggggccagcagtcactctgttagatttgcaatttttctgcttttgtttgtttgtaaatgaaaatgatacttgagacagaagtagaaattctcccttaagagaatttgatccaacacttaccctctataatgttacatgtaaatatccctttggtaattgcacatatattttttctgttgctgagtgttatgcattttctttcctttcatctattcagagggagcaataagctatcgcttttaagtgaaaagtacagggcctacatcagagcacttaaaatatatgcagaatcttttaataaaacaatttaatttcctattactaaatgatctggacttacatttttcacccagacgaattgtacgtgggcagaccgcagagagtttggctgtgcataatataacagtttgtgaacaaaaaatctcagaatggggaaaaataaaggaatgcccaatccctcagtttgctggaaaccctcctatggtatgtacaattcattgttgttattacagtttcattactgacaatctttaacctgtgtctaagaaacatgtacagatgttatacatctatatagatgtccattacaaatgtcatggaacagctaaaacatgtgtctacttttctctgctatacttattggatagaattgtttcttgaaaactaagctttgcattgttctgttattaacatcctgatataaaacttgggaaaatagtgtttttagaagtgctgttttggttcaagaagttccatctcttttcttcatgacgacgccagctaatgatttttagggggacacttgggattccatcttgagctgagttggatagctcaaataaatcacttataaggagcaaagggcctcttcagataccagcacataatactttctatacagctttccaatttgaaaaggaaattgatgaggtggtacataaggctacctttaggcattaggagttttctgtttatgaggcataaaggaggctggacggcgaggttcataccaacatcccaatggcatcatgtggtgggcagaagtgtggcaagggtgaccaaggaaatacatggtgaaatactttcttccttctattgggagctctgaagggttccattttgtgtattctcataacactgctccatagagtaagatgtgggccttgtaatcttcatatcattttccccattggcagatggtatactttgttggttattgtgctagccattggtataaaactaggcaaaaatcaacatttgtgcagggcttctgaagaggattatttttttttccttaggcacagtataacataaaggcaaattttccattccattttctcctttcttttttcctactctcttagcataggagcactcttactctagacacagcatactatatgaagacgtaggatctttaagcatcttttcccattaatggaagcaaccagacatatcagtgaattggctccactacatgcagacatcaatagaaaggataaaaagggaactgtattgccaatcctcttgtgggcaggggaaggcacatttcctcgatgacagctggagtcagagtactagtaccttagcagaaacctacctcaaagaatttctaggtatactagcagcaatatccaaatctggctccattcagtggggctccatggtagcactcaggaaacagatagatgatttgagactgttttatatatctatcccattaaaacaaaggccaacaacagaacattgtttatatttggggcaaatattcttcaagtttggctgaagatggagagattcaggtgctctcaatttccaacagtaagtttcctataaaagtaatctagtagaaagattatatgtgagactatcggaagcactctcttatcttttcccccttagaatacattccggaaagtcattttttagataatattgctgtctaaaattctttgctagtttaggtattaaactagaagtccaattggctgagtttcaggatggatctgtttgacctcaatgtttttatatggccaataatgctacagagtaattccagtgttcagaaacactgcatgttctgacccaagaaatagctaaagaagtctgaaaagctctaggtttgtctccattcagcaagtgcattgcatactcccagaatttctcagaatattggagaaacagccaaactcttgcataaaatttgtcatcttgcaaatttgtcactgtgactacataactaagagaaagcaatcacagtgttgcattaaaaatattgtgttgctgaaatgttatcctttaaagaaatgttaattctgaaaccaaccttgctttgttatagggttactgcaactgtagttgcaacactgagaggaaatcccattcttgtgaggagttcctcttgggaaagttttatcttgtcagtacagttccccattgtgactaaggagaatgtttacttttactggctcaaaattatcttagtttcagatattttcatatattccattgtagaagaaatttatttatctaatgtcaaatatttaagcaagcctacaaagattaacttggcttctaaaatttttctccctctgaatattttgttatctattaccacttaatgtatctcattttcatttttgctctgattacagacttggaaatggatagtgggtcccatgtttctgtatctctgtgagaggttggtgcggttttggcgatctcaacagaaggtggtcatcaccaaggtactgattggtttagtaattactagtggtcagtgtctaactatatcatggacaagtcttcccaactcctctatatcattgatcagatgttacaacagagagaagacctacaatttatttcaatttacttagctcaataatcaaatgtttgagcctttaactggggaaactacaagttaccatttttgatgttaaaatgaagccaagttctttctggacatcaatctcccccacccattgtgtgtgtgtgtgtgtgtgtgtgtgtgtgtgtgtgtgtgtgtgtgtttgtgtctgtgtgtctgtgtgtttgtggaggggaaggcgacagaggcattatttggttagttaagagcagaaaagaaaaagaggtgagttcaaaggggcataaattgagtcttaaaattttcagatgccaaaagaaccagagatctaagggtaggtctcactgaggctgagctagtttttcaggttgtctttaccaccttttctgtgctgtgtatgtaataatctaataggaaagttgaagtgcccaaaatttcaacaagttagtaaataagctgcctctcaaatttgctctcctaattccaagtctagagtggcttttcctgaactctaatctgtttctcatcacaaaataaataaatatccaactaaataaatgtaaatggaactccttgttataatttcaggaaacactaggaaagtctatctttatcaaataaaatttaattcaattcaactcagttcaaaaagtatttgccaaaaccctactgtgggttatttttgcaaaacacacaaattcttcctgtcctccaccctatctttcctcatttgctgtctatggtgggtcatagtaaagttagttcagctggctttggaagtcttgaaatataggaaaccacaacagttctccttttgtgatatttatattgcattataagaacaatcccacagatcagcaaaaacagttgctgcaaaatttcccttactagactagagatgactgagtcagacaagtatttttcttaaacatacttttaaggaaaacttgttttcctttgaagaaaatagatatttgttttcttctcatataaataaatatgagaaacaagatgttatccaaaagtattccaatgagaatgctgtccacttatttagttacatctcatttgtgcctatgatagcaaaattgtaatatggtaaaaattttttccacaacacaaaattgcaacatggtaaacaattttcaacataattttaattttctgttttcaaaatgaagctttacaactccttatttcagaacagaagggaagtttgttatagtttttatcatgtaagatgcatttaaatcacaagttctggaaacgtttgacatttttttaaaaaagaatttttcactcttccacaactccctgttcgagaaaagcccagcaatatcagttaacattaggaagctgctattttatttctattgatttttctttcctttgatgtcccttggtttgtctttaattatacatataaggttcttctagaagtcttaggaatcatcaaagaaacagtatattactttctgtattgctcttcactgtgttctattttttaaaaaaattatccagtcaatagttgatggacatttggattgtttcctgttttttgctattatgaataaagctgttataaacgtgtgtacgtagacagatgaggatggcaatgggtgggtagaaaagatggtgtactccccaggtagggagaaatgtagaaataacgcatggaatcaggcagattcaaggtgtgattcaggacaaagatagaccaacttagttagtcttgttttggggaatgttgctacataactagtcaatgggatctccttcttctggccagctattaggttggtgcaaaagttattgcggtttttgccattaaaatatggcaaaactgcaataatttttgcaccaacctaatactaaggccctctctcatcctcttgggggataggaaggctgagcaggaaacatcagtttttgtaaattttttagcacttttttgacttctgagaggaaaaaaaaatcacaataggctgatttcttatgttggattccctggtaaagactgagaaataactgcatgcagaaggtttctaaggaattctataagagataaacctggaaaggaagtaagaaaggcaggaatggggagagagaaaagctgatcctctttctagttgtaactgtggcctcagctgatactacagggagtgtggaaattgagatggcctcttggagttaacctaagttaaggaaaagggactaggccttagtatcccttaatcagcccatcattagtaatgggctacaactgagggcaattccctgtgacagacacatctgctggaggaactcctgtgttgtccctaaagcagagatctaagtgggccaatttagctcagttttttatccatatggacactaaaaaggcaagtatttaggaaaaatgtcatttccagacatatgttttattctataggtggtcactcaccctttcaaaaccatcgagctacagatgaagaagaaggggttcaaaatggaagtgggacaatacatttttgtcaagtgcccaaaggtgtccaagctggagtggcacccttttacactgacatccgcccctgaggaagacttctttagtatccatatccgcatcgttggggactggacagaggggctgttcaatgcttgtggctgtgataagcaggagtttcaagatgcgtggaaactacctaagtgagtaaaaagtacatattaccaacgtatatgagttcaggaaaaatggcactaaatagctcctcttcctccatgttttactaagtctccaacaaaacacacaggttctaagaatataggtagctatttctgtggtcaccgtttcatatgtgtagtgtgtttatgcatattttcataaatcttatgtgaaatatgaaaaccttgaatcaaatattagaaataaatactcccaaattcctttaaatatgtaagggtcaaggccaagttatattaactttcctaacaaatataattgtagtgtatcaaaaatattcttaaattttcattggcataatttatttgaggttaaatgccatatattagcccctttgcctccttttccctgcatgcctaacatgctataaggcacttagtaggtgctaaagaaaggtttgagagtttgttgaataactcaatgaatagataaatgaaaagtggagacattaaatctacaagatgtaatgatgcagcaaatcctcacttcagggtgcaccgtatgcaagaatttcaagagtgggatgtcctggcaagacatagggtgtgtgtggagggggcgttgttgtgtgtgaagaggggtggggagattaaaaaaaaaaaaaacttgttctgagttaccgaatgtttttggttagccaaatatttctctttttacttccaaacccaacgttggcactaagtttggttacttgaaagctatttcatagaaggaagcacccaatagatacattattccaatttgaattaacatgttgcacatccccaataattatgggtgccccatctcactctgaagagcaagacatctctgtaactatctcctccccatttcccttcaggatagcggttgatgggccctttggcactgccagtgaagatgtgttcagctatgaggtggtgatgttagtgggagcagggattggggtcacacccttcgcatccattctcaagtcagtctggtacaaatattgcaataacgccaccaatctgaagctcaaaaaggtaagtcctttcatttatcggagggccttagagcagtaaccatactctgccatgtgaggcctgagagtgctttcagggctaaggttggcagagaccatgggaagtgaagaaaagcttccggtggttccagagagacaggcttttcttcaaaagaatatttgttaaatctaatgtgcttctagataagtaggcctattagtgaagggaatatattgtatttgtatagtgttgctggaaattcagaagaaagaaagttgggaaagtattcacagccccaacttaatagctgtaatttttgtatattctcttctaatattttccatgtttacatatttttagaaggttgtaaatattaagtatgtataatttcatgtcctgcttttaaaaaaacattatagaaagtgtttttcaatgtcttcacaggctttataatgatgactttaaatgatctcttcatgttctattgagaggatattgaataatttttctttcatcttgtgttagatactgagattgattcaatttccagccgcgccccaccccctccactcacccaatactttttttgcaaagggaggagaggagacctgaaactctacttatgaatatctcctcaggatcaattcacaggagattttttggttacctataaatttggttttattgtgtaataaagggcatcctaaataaacctcaggccattctaataactgtaaagataaactctaatagggacattaagcctaccttgacttttcattctccctgtacctcttttccatgtggaggagatgtgcatagaaccttatttttcccctcggaactcatgaatgtctggcagtagcagccagggaagaatttctgtggcaatccctgctagtctagattccatcaggctttctgagaagaggttcgaaggaagccagagattctgggagagtaagagcagactcagagggaaatttggtgggctaatagttttttcttaagttgtgtatttctgaggtcaagttacttatttactgccctgctagagtgaaggccagagcaggttcatgtaaactaccctgtgaaatgtccagagccttctgaaaatctatgtttctaggcattctgagcatcaagaaaaagtttaggtgacagaaagtggaattccacatggtaatgctgatagggcctgccaaatataatctgcttcatgatccaccccattttcagatctacttctactggctgtgccgggacacacatgcctttgagtggtttgcagatctgctgcaactgctggagagccagatgcaggaaaggaacaatgccggcttcctcagctacaacatctacctcactggctgggatgagtctcaggtaaggacaagactccaaggctcaggtccttcccatagtgtacagggcttacgaacttccccttggttattggtgtgtcttgtgtactattttttctaagtatgtttagtggatttggtgatccggtccattcactctcatttagtatcgccacattatatttagactgctcagattagaatcaaagccaaggagcctgtgagggaataaaagccatcactttgacattattagagcaattctcccaccaggcactctgaaaccaggtgattgagatgatgcacagggttattttggggaaaatttagctttctctttctctctgtctctctctctgtctctctgtctctctctctctgtctctgtgtgtgtgtgtgtgtgtgtgtaaaacagacactccccaacttaataatggttcaacttatgatttttcaactttacaatgaagtgaaagcaatatgcattcagtagaagccatacttcagtacaagccatacttcagtactgtattcaataaattacatgtggtcttaaaccttttattataaatagggttcatgttagatgattttgtgcaattgtaggctaatataagtgttctgagcacatttaaggtagtctagactaaactaactatgatgtttattaagttagatgtattaaacccattttagacttatggtattttcaatttagtgatggttttatcaggatataacaccattgtaagctgaggagcatctgtttatataacatacataagcatataaaggattctgtatatatatattttaatatgtatttatatatgtatcatatatatttatatgtactatgtatatatgtatttataaaatcatttaatttatatgcttttgtatgttttataatatactcactacatttataattattatgcatatatattgccaggtattattcttatgtatctagtcacatagattgtctaattttatcatgtcaccaaccctatgaagtagctcttattattttccacactttacagatgaaaaaactcagaccaggttaggtcattttcctaagagcacccaacaagtaagtgacagagacagaatgtgccagagcctgtcctttcagcatcttgcagtagttcatgattatcatttataaataaattactatatatctaatgaatgtgatatatatgcatgtatgtgtgtgtgtatgtgtgtgtacaatgagagtgctctttcaaaaatgtttggagaccactataataaagtagccaatagttctcaactgggacaattttgctctgctcctccccaagacacacaccagagacagttggcaatgtaaatatcctacaattaaaaagacagccccccacaacaaagaattatacagtcccaaatatcaacagtgctgaaattgacaaaccctgaaacaaggtaatgattcctggagtggtaacatctttgtaagtaagcaaacgttaatgacttggcctggaagcagcataagctatcaccatgagtgaggagctaaggcaagagtctctgcatatttctgtccagtgtctcagctggtgtcttagtccatttgtgctgctataacaaaacacccaagactgggtagtttgtaaagaacagaaatttattttctcaaagttctggaggctggcaagtccaagatcaagacaccaacaggtttggttgtctagcaaaggctgcatcttctgggtgggagaaatactgtgttttcacatggtggaaagaaaaagggaaggctcgtcaaatactgtgtgatgactcttttccaaagcccttaactcattcataagggatgatccttcatgtcttaatcacctttttaaggctccacttcttaatgctatcacataggcaacatctgaattttggagaggatacattcaaactgtagcaactgggcatacatagacattgactccacaaccctgggaatcttccatgtgcaccctgtcactgtgaagactgaattcccatttgggtttcaacatattgtttatcacagattctccaagtcttaaaggaatcttgtagcaaatatagattagggaaacataacgataagaattgttgctccataaaaagtggtttcaaaatgccagttctgcaatttaaaaacaaaacaaaaatgctttgataaaaataaaactcaggaaaaaaatctatagtatataaattgctttactgttctgttattttaaaagccatgcacaggtttcttttttaaatcagttatttatttgtattgaaaaagtaattattttgctttgcaaaactgatatctatagaattattaaattggagtgcccacctttcttaacctcctctatgaccatcatccatctagtgaatttcaaatctgatttgctttttaaaaataaatttaattaaccacttttatgaaaaatacctgttgctcaaactgaagcctcctagaatggtagcagaaaaacagtatgtgactatatacacatatgtgcgtgcacacacacacatacacacacactagctttaggcttgatttgatgtcttatgctaccaaagtattgctgcattttagtctaaaattgttacatctcttagtaattctcccaaaggagtggaagtatattagggtggagagaaaaagtcaaacatagagcagagagaaaaacagtgagacactattcatccatcaatgcctgactcaaatactgcggccctaacccttcccctattcttccacttcaccttccttctttgttctcattaggacgcttgtgcctccttcatgacacacatcataccctgttcgacatatgggattatttatatttatacttcgaagtctccctttctagactgtaaattgcttgagagagatccagtttatttatctttgtttacctttcagcatccagcagggtgccttggttagaatagcttgtgaaggatgtaaatacattgtatgtgcttttacagaatgtctcttttttttctgaattcatgtcctttcctgtaggccaatcactttgctgtgcaccatgatgaggagaaagatgtgatcacaggcctgaaacaaaagactttgtatggacggcccaactgggataatgaattcaagacaattgcaagtcaacaccctaagtaaggagtctgtcaccaagatgtttttgaggcttgcatctgcctaaagcggcagcccctatacatatctaaacttatatattttagaaactcaaatatgtatattactatataaagattgaattcatgcccaacagaagattccagatatcttcaactttaagaaggatctttaaattataccaaattacctggagattaattaaaaacaagtatttccaggtccccatctcagattttctcaacctgcctgtcccaagtagggccacagcttagttcttttctttagtcacctaaatttcattagtgtatctacttcttttaaagattcaatataatttatacatattgttaagaagacactgtccccactttcagttctaaaagcttctgggtctaaaatcttaagttgacagatgtctcaaggtgctttctgctctcactaaaactttagtcattataaaaccttgagggggatcccttatcttgctagaacacctaagaaactcaagagatcaccatacgtgtacccttcagactattgctttttgcactgtaaggagcatacaaagtgcctggggatctctttaaaatgcagataccaatttagaagatttgaggtagggccaggtaatctgcattttttaaaaagctgacgccaaggctactgatcagaaaccacactttgaacagggcttcagactctaaaatttagagaaatgaagccacactgagtggttggcatagttagcttgttcctaatttcaagatgccagggggcacagagccctgaaggaaagtagcccacggactcatgaattcaccaccattttctctgtgatagaagtttccaaaaaccttggttggattttacttttgccagggaagtcaactaccttttgaactatccagatgctcacacaaacaggctgaaccacactccctctgagcaatatgatccctttgctatttgtggaaaagaaaaaggagcagaggggactctgccctggggcctcaaattaacgggaaattcacctacctgctttgtagacatctcatcccaaagcttgaaattgtctttttttttctttcccaaaagtaccagaataggagttttcctctgtggacctgaagccttggctgaaaccctgagtaaacaaagcatctccaactctgagtctggccctcggggagtgcatttcattttcaacaaggaaaacttctaacttgtctcttccatgaggaaataaatgtgggttgtgctgccaaatgctcaaataatgctaattgataatataaataccccctgcttaaaaatggacaaaaagaaactataatgtaatggttttcccttaaaggaatgtcaaagattgtttgatagtgataagttacatttatgtggagctctatggttttgagagcacttttacaaacattatttcatttttttcctctcagtaatgtcagtggaagttagggaaaagattcttggactcaattttagaatcaaaagggaaaggatcaaaaggttcagtaacttccctaagattatgaaactgtgaccagatctagcccatcttactccaggtttgatactctttccacaatactgagctgcctcagaatcctcaaaatcagtttttatattccccaaaagaagaaggaaaccaaggagtagctatatatttctactttgtgtcatttttgccatcattattatcatactgaaggaaattttccagatcattaggacataatacatgttgagagtgtctcaacacttattagtgacagtattgacatctgagcatactccagtttactaatacagcagggtaactgggccagatgttctttctacagaagaatattggattgattggagttaatgtaatactcatcatttaccactgtgcttggcagagagcggatactcaagtaagttttgttaaatgaatgaatgaatttagaaccacacaatgccaagatagaattaatttaaagccttaaacaaaatttatctaaagaaataacttctattactgtcatagaccaaaggaatctgattctccctagggtcaagaacaggctaaggatactaaccaataggattgcctgaagggttctgcacattcttatttgaagcatgaaaaaagagggttggaggtggagaattaacctcctgccatgactctggctcatctagtcctgctccttgtgctataaaataaatgcagactaatttcctgcccaaagtggtcttctccagctagcccttatgaatattgaacttaggaattgtgacaaatatgtatctgatatggtcatttgttttaaataacacccaccccttattttccgtaaatacacacacaaaatggatcgcatctgtgtgactaatggtttatttgtattatatcatcatcatcatcctaaaattaacaacccagaaacaaaaatctctatacagagatcaaattcacactcaatagtatgttctgaatatatgttcaagagagagtctctaaatcactgttagtgtggccaagagcagggttttctttttgttcttagaactgctcccatttctgggaactaaaaccagttttatttgccccaccccttggagccacaaatgtttagaactcttcaacttcggtaatgaggaagaaggagaaagagctgggggaagggcagaagactggtttaggaggaaaaggaaataaggagaaaagagaatgggagagtgagagaaaataaaaaaggcaaaagggagagagaggggaagggggtctcatattggtcattccctgccccagatttcttaaagtttgatatgtatagaatataattgaaggaggtatacacatattgatgttgttttgattatctatggtattgaatcttttaaaatctggtcacaaattttgatgctgagggggattattcaagggactaggatgaactaaataagaactcagttgttctttgtcatactactattcctttcgtctcccagaatcctcagggcactgagggtaggtctgacaaataaggcctgctgtgcgaatatagcctttctgaaatgtaccaggatggtttctgcttagagacacttaggtccagcctgttcacactgcacctcaggtatcaattcatctattcaacagatatttattgtgttattactatgagtcaggctctgtttattgtttcaattctttacaccaaagtatgaactggagagggtacctcagttataaggagtctgagaatattggccctttctaacctatgtgcataattaaaaccagcttcatttgttgctccgagagtgtttctccaaggttttctatcttcaaaaccaactaagttatgaaagtagagagatctgccctgtgttatccagttatgagataaaaaatgaatataagagtgcttgtcattataaaagtttccttttttattctctcaagccaccagctgccagccaccagcagccagctgccagcctagctttttttttttttttttttttttagcacttagtatttagcatttattaacaggtactctaagaatgatgaagcattgtttttaatcttaagactatgaaggtttttcttagttcttctgcttttgcaattgtgtttgtgaaatttgaatacttgcaggctttgtatgtgaataattctagcgggggacctgggagataattcctacggggaattcttaaaactgtgctcaactattaaaatgaatgagctttc

SEQ ID NO: 56 - DNA, 30559 bp, Homo sapiens
  source 1..30559: mol_type = genomic DNA
acaagtctttccgcctccccagcccgcccgggagctgcgagccgcgagctggattatggtggcctgagcagccaacgcagccgcaggagcccggagcccttgcccctgcccgcgccgccgcccgccggggggaccagggaagccgccaccggcccgccatgcccgcccctcccagccccgccgggagcccgcgcccgctgcccaggctggccgccgccgtgccgatgtagcgggctccggatcccagcctctcccctgctcccgtgctctgcggatctcccctgaccgctctccacagcccggacccgggggctggcccagggccctgcaggccctggcgtcctgatgcccccaagctccctctcctgagaagccaccagcaccacccagacttgggggcaggcgccagggacggacgtgggccagtgcgagcccagagggcccgaaggccggggcccaccatggcccaagccctgccctggctcctgctgtggatgggcgcgggagtgctgcctgcccacggcacccagcacggcatccggctgcccctgcgcagcggcctggggggcgcccccctggggctgcggctgccccgggagaccgacgaagagcccgaggagcccggccggaggggcagctttgtggagatggtggacaacctgaggggcaagtcggggcagggctactacgtggagatgaccgtgggcagccccccgcagacggtaaggtggtcaggccagcccttagccctccgcctgcatgagcagaggggagacaggatggggatgcctcaagctagcccctgctcaaatgggctggtggggacagcaggagggacccctccccagccattccccgggggtcacgtggttgttggcagaagtgttcccaagctccccattccctcctcgtctcccctggctgcctagttccccttgctcctcatctgacacatacgccgtctggaaggatttgaggcaagacagacacatcagctggggaccctgacctggaggaagggtccgccacaggggcactataacaggtgtcagccccctctgacagtggcccagtccgagtctcccaaatcccaccactctagaggttggccacccaaccttgtcccctcctctgattcccaccattgttcccagtacctccaggaccaaggaatcctggcagcagttgaataagcaccttgctcccaccatctgggctgccactggtacggcaaagtgaggttgtcgaggcccccctgactgcactccgcccggaagccctggacaggctcctgccgtcccctcctcctccccttctccctctcgcggtctacactccggcccctcccccaccccacacctccccaggccagaggggaactgaactgagcctggtgaaagaacaaatggtaggaaaggagccagagctcccttttaagagtgggactccttccatggcgggggagaggggagttacagagaaaacactgttatgccctccccatccttcctgacaatctccaaggtaccttcaaggtggctggtggaggtggcaccctctgcacctctgtgggtgagcagccctccatgtggggtgctgtggctgacctctgtgtgcatctgccgcctctgtggggcagtccgggcccgggcagccctgtggttctgtgtatgctggtgcgtgtcaccttgaatctgatcctgcacatctgtgagccacctccggatctgtgtctgggaagtctgtccttgggagggtctgtgaaggtgggagtgtgtttggggtgggcggaggggacagccacactttcctgaacttctcagacagctggatctgggagaaacacaaacccccacctcccaattactttacagaagccagccttcctaggtgcgtgctccccagccctacctctcagctagtcgaaagcctggtcttccccactttctcatcctctttcctgtgcaccataacttccccagcagtagtctccagtgggaatttgggagggcaggacagaagccaaatccaggccctgagcaaacagaacgctagatgatatcgtcagggagcagcaggtatgcagagacctgggacctactcctgtttctgcgactgacatgctgtgcacactgtgcatggaccccatggcacgatgcaggacggggctgcagaacccacacaagctttgaggtcagacagtccacgaatcccagctctaccacccacagcttttcctcttctcagctgtgtggccttgggcaaattgcataacctctctgaaactactgtcatatctttaaaatgagtaggaaatgagacctcctttgcaaggtaattgtgaggattaagttgtgagggttaattgttctaggtgctttcacccagaacaatacaccagcatataaaactgacctccaacaaatatgaagtcactttatccttgtctggcctgttctgcctcttcaattctatgcaatgaggcataaaaactcggatgtcctgggcctccacgttttacatgtataaaactggggtatcctgtaatcccagcactttggggggccaaggtgggcagatcacctgaggtcaggagttcgagaccagcttggctaacatagcaaaaccctgtttctactaaaaatacaaaaataattcgccgggcctggtggcatgcacctgtaatcccagctactcaggaggctgaggcaggagaatcgcttgaacctgggaggcggaggttgcagtgagacaagatcgcaccattgccctccagcctgggcaacaagagcaaaactctgtctcagaaaaaataaaaacaaaaacaaaaacggggtatccattgctgtacttccctgatcccctgaaataatgcatacatcctgcagcccagtacttagcagagagtaattgctcaataaatgtcagttccttcctcgttcctttctagaagaggaaagtgggcttaaagttcaacaccagtccaggaagctagtgccagggagcccacaactaaagcaactgtgtggcttgcactatgatttctaactaagcctgcatcagccagtctctgctctctggtggcttggactctctccccatctgtctgtaagaaggacgccctttcttcctacctggcgcggctgttgtaagtgccaaatgagaacttggatggcattgtattctgaacaagaaaaagtaaaatttggggagcactttctctgtgctaggcaattaattggtggtgcctgggggctgatccacaaagagacaagaagacatgttttctgcccacatagagttacagtggaagtgaaagggcggaagtgacgagtacaaggtcatccatgcagatatactcaaagcgaggtcggcaaaccctcattggagtcagctaaaaatgtaaattccctggccccatccctgacctctagagacaggatctctgacagtggggccccgtagtttgtgcctcaaatttgagaaccatttatggctggacgcggtggctcacgcctgtaatcccaacactttgggaggctgaggccggcggatcacctgaggtcaggagttcgcgaccagcctggccaacgtggtgaaaccccatctctacgaaaaatgcaaaaattatctgggcatggtggcaggcgcctataatcccagctactcgggaggctgaggtaggagaattgcttgaacccaggagacagaggttgcagtgagccgagatcacgccattgcactccagcctgggtgacagagcgagactccgtctcaaaaaaaaaaagaaaagagaataatgtatttataggagtgcagagagtgagtgccacaggtgttcagaaagtgataaactcatccaggaaagccgcaccagggacatgtgctctgagcatggtcttgaaggatggacaggagtggcaggctattcccagggggcagatggcaccatactatcccactgtactgtaattgcacgttacacgtatgtccatgtctgctccttcccaccctacccccttaaaattgggagagtccacagtgaatgagaggatgagttatggatgttagggcttaagcatggttgtttaggagacaatagagagccagtcctgttaatattacaggtttaggctaagaccagataagtttgggtaaataaaatagagccaaatagccataaagcttaaatgtgagactataaggtttggactttggccttcagatataagggaaaatctgaatttattggggcaggggaatgacatgaagaaagcaatctttcaggaagagacatctgaattttaaaaagagtgggggctgtgtgtggtggctcacgcctgtaatcccagcactttgggaggccaaggcaggtggatcacaaggtcaggagttcgagaccaacctggccaatatggtgaaaccccgtctctactaaaaatacaaaaattagctgggtgtggtggcgcgtgcctgtagttccagctactcgggaggcagaggcagaagaatctcttgaacccgggaggcagaggttgcagtgagctgagattgcgccactgcactccagcctgggtgacagagcaagactccgtctcaaaaaataaataaaaataaaaagagtaggactgaaagacacaggcacagggggctgtcacaacagtccaggtgtgaggccctctatgacaaggagggcatgaggctgcaataagatggaaagagaaaggaagggcaggatgcagagaacgtgccagggcaggtgggaaggatttggtgacattggtgtgaagggaaaggaagagggcatcaaagatggttttgagattctgatctggggtgaactggaggataacaagactgtgggaataggaaaggtggcaggaggggatggcttatagtacttgtatacaaatttatttgcttgtttattaattacagggtctctctctgttgcccaggctggagtacaggggcacaatcgtaactcctgggctcaagtgatcctcctgcctcaggctcctgagtaacttggattacaggcacatgccaccagccccagctgattttttcaaattgtctcactatgttgcccaggctggtctccaacttctgggctcaagtgatacttccaccttagcctcctattagtttttcccttacagcaattcctgcaatatataaaaggtctttacttcagtgagctgtgattgcaccactgcaatctccagcttgtcagaggatgacagagaccctgtctccaaaaaagaaaaaaaaaaaaaaaggtctttatcactcacagtgtctagcagaagaaatggggttgaaaggttaaaccactggccaggtagaaggccagtaagttaagacctgtttcatccttgttcttcctactgtgccatttgtcttggggaagaagaagttatcacaagcatccctcttccattctcccattacacctgcttatatctccattactacacttgtaatgtattacaactgtttttgtgtttgtttctctcataaaacttcaagctctggccaggcgcagtggctcacgcctgtaatcccagcactttgggaggctgaggcaggaggatcatctgaggccaggagttcaagaccagcctgaccaatatggtgaaaccctgtctctactaaaaatacaaaaattagccaggcgtggtggcaggcgcttgtaatcccagctgctcgggaggctgagacaggagaattgcttgaacccaggaggcagaggttgcagtgagctgagattgcaccactgcactccagagcgagactctgtctcaaacaaacaaaacttcaagctcttaaggacaatgtctttttaattttatttatttattttgcagtatcctctctttgtgttataataatctataacaataccaagctcagaacatacacctaaaaaacattgagtgaatgaatacataagctgcaagcctctaaacagaactgttgacaggcagttgtaaatgcagaactgtagctcttagagaaagtatttttattcttttaaacgaaagggccaggttcagcagctcacgcctgtaatcccagcactcaggtgaggccgaggcgggtggatcacctgaggctgggaattggagaccagcctgcccaacatggtgaaaccccatctctactaaaaattcaaaaattagccaggtgtggtgctgcatgcctgtaaacccagctactcaggaggctgaggcaggagaatcgcttgagcccgtgaggtggaggttgcagtgagccgagattgcgccactgcactccagcctgggtgacagagtgagaccctgtctctaaataaataataaataaataaaaggatgttatctcattttgatattatgagcatcactgaccaaacataggataataaggtaactgttaggagtgaaatttggtgatagtcaattcagtttaacagatatttgttgagtacttgcctactgtgtgtagaagagaaaaataatgccatagtcttagcccttggacagctcacaatctgatgtgagacatagacataatacctaaatattacacaaaaccaaatgcatttggtacaaatagtgaaacagtggatcttggaagtgcacagagagaagcagctacttctgacatggtattaggcacagcttgctggaaaaggagggttttgttttgtttttgtttttgagagggagtctcgcccagggatccacccgcctcagcctcccaaagtgctgggattataggcgtgagccaccgcgcccagccaaaacggaggtatttgaaagaggagaaagctttgcaatatggagagtggtgaggaggagcacttcatgaagaaaagcgtgaactgtggtgagaagccagaaggcatggtggggatgccatggggctgacaggactttgggttttattctgcaaacagtaaggaatccttgtaggtatacgagaagagggatgatatcgtctaattttagttccaggaaaacagcttcagtgtgcagaataacttggagagtctagcatcatgactctagacatgcaaacaaggatctcaggatacgggggcctgaaagaggatggtggcagtgagggtagaaaggaggaatcagcattcatccatcgtttaaccagttattctctgcgcttgatgagatgtatggggtgagagagagggaagaggagatgatggctttatttaacctctctgactttttgtcagggaacaaagcaacaggggaaagcttttgaagcacaatatagtttttttgtttgtttgtttgttttgagatggagtttcgctgtgtcacccaggctggagtgcagtggcgcgatctcagctcactgcaacctccacctcctggttcaagtgattctcctgcctcagcttctcaagtagctgggattacaggtgcccgccaccacccccagctattttttttggtatttttagtagagatgggggtttcaccatgttggccaggctggtttcaaactcctgacctcaagtgaccgcccgcctcagcctcccaaagtcttaggattacaggtatgagccaccgcacccagccaggaagtacaatatagtttaccaaagtttatgtttattattctgctttaattataagggataggtattagcatatctatttcagggataaggaaactgagacccagagagactaagtgtcttgtccaaagtgattctgttaagaagaacagagtaggggttcaaataccggggcctttccttcctgtgttctacgatctgggacatgcctttgagatgctagtgggtcatcctcgtggaagtattcagccaccagctgacagtgggaatctggagagaagttagaactggacaggcagacaggactcatccacagagaggccaagttaaaaaatagacttgttctttgagggaacagagagggaaaggagaaaaatgattaggaaaagaatattaggtatagacaagggagcaagagaaaatgatcagagcagtagaaaactatgagggctcagagtctcagaaaccaagaaggaccaggtggtttttctttttttcctctccttccctgcttggcagggttctgtaaagggacctcagcggtgagggagaaggctgggagcagtcaacactctagatccccgcccttcctgtcaccaagccatccccatccccccgccccaaatctcctgagcatcccaggataactttgcttttattgtttttatacagtggacttctgggttatatttttttaaaaaagagtttttgcaataaaaaggttgaaaaccatcgagctcaaagaaccaccctccaaattagacaaagccagcaagaccccggctccataagttgcctacccagtccctgccaccacaactggctttcctggattgggcctcgggttgcacacaagcccttgctggagcactcatcctgtcattccaaacctctcctctactccccagaccagtaaagaagagtttagctgggagtgagggggcattgagaaagactgtgctctctctaaaagcactaaggtggaaggtcaggaacccttcttgggcctctccaataaagggctgggcagaaaattccagttgaaaatccagaaagaggccaggcacagtggctcacacctgtaatcccagcactttgggaggccgaggcaggcagatcacctgaggtcaggagttcaagaccagcatggccaacgtggtgaaaccctgtctctaccaaaaatacaaaaattagctgggcatggtggcacgtgcctgtaatcccagctaatcaggaggctgaggcaggagaatcgcttgaacccaggaggcggaggttgcagtgagccaacatcatgccactgcactccagcctgggcgacagggggaagactccatctcaaaaaaagaaaatccaggaagagaaacacctcccagggaagcccccatacctaatgactaacttctgtctctcctgggagccttctctttcaggtgcctgggcaggggagagttctgggaaggaaccagaacattttctgagttctggagctgccctgagattctcctggcaggatgcgacagcacctgagtacatccttagtaccgcagccttgggtactatagccaggtgtttcccaaaataggagagctgggctgtgctggggagaatgaggaaatcagcagaactggggggattctgacgtgggggagctgggactcctaggtccttttcctcaaagcaaactggccaagctctgcctcctcccatgccaacttatcctctgtcaccatatttcctgagctgctgtcactctggggccaccctctctgctgcgcactgtaggctgggtgtcctcttgcttggtctttcaaggtcagtgaatctcatcacttagccttttttctttttttttcttgagacagggtctcactctgttgcccaggctggagtgcggtggcgcgatctcggctccctgcaacctccacctcctgggttcaagcaattctccagcgtcggcctgccaagtagctaggactacgggcacgcacaaccacacccggctaatttatatatatattttggtagagacggggtttcactatgtggccagaatggtctcaaactccttgacctcaagtgatccgcccacctcagcctcccaaagtgctgggactacaggcgtgagtcactgtgcctggccctaccacttactcttttccaaggcctgtggaggttttgacaggtaggacaaggagtgagttctagcatctcccaatggcttgaataaacaagcccatgtgctgagcgtgacacaggtgccatggtcagcttcattttcaactgaggacagagcaagagaagattcaagccactgtaacctgtgggtgggacaaggttaaataacaggaaggacttactgtctgaccatgaaaaacaggtggcgaatagctgctgtgataccttgtggagcatgggttttccaggtgggttccgcagaggctaaaggtgctgaagagatgcctcaagagccagcacaggcaggggagggaagcagaggaaatcaaacctccccttcaaacagaacacctctgtctttttctctcttgtacactaggatcctgcatacaattggaaaaggggaaaaggattccgctgctttattttttatttttatttatttatttatttttgagacggagtctcactctgtcgcccaggctggagtgcagtggtgcgatctgggctcactgcaagctccgcctcctgggttcacgccattctcctgcttcagcctcccaagtagctgggactacaggcgcctgccatcacgcccggctaattttttgtattttttagtggagacggggtttcaccgtgttagccaggatggtctcgatctcctgactttgtgatccgtccgcctcggcctcccaaagtgctgggattacaggcgtgagccactgcgcgcggctgattctgctgctttagaaaaaaaaaagtttgaaaattactgtcataaactcttggaccatcgacatccatcattctattggagtaggaggcactggcaaatattagttgagccgggttacaggctgcggagaaatggggcatcccatccaaagggggaaaggtatactagataaggtttggggcgacccagccacattgggactccttgaaaaaccagccagaggtggggtaagtggcgccagggagcctgcttgctcccaggtaccaatggccagctacagccaggagaggcaagtggaaggcagaggaactagctgggaaaaggagtccatttgcacagggctggctgatttgttcaaggtgggaggaacctggacaggacccagtcgctggactctgagacaggagctgtgtgctctgttggccataagcccctccccgctgctgactttaggctcctcttgtccttccttgcccccttttctcagccttgggtaagctcaggtctggaaatcacttaggaaaagcagatgaagctgactcacaaggttctgggactaaggaggcctggagtcactataactgctctaagaaccacaggaccctgggtggatattcaccaacatggtgaaaccccgtctgtactaaaaatgcaaaaattagctgggcgtagtggcgggtgcctgtaatcccagctactcgggaggctgaggcaggagccaagattgcaccactgcactacagcctgggtgacagagtgagaacccacctcaaaaaaaaaaaaaaaagaataggaagagtccatagggtcataggaattaactgcagggaatgaggcagttgctgtcaattaaaaaaaaaatcattacggagcatctactcagggctaggtaacaattaggtaataagcaatacaaatgctccctacccttggtggagctcatagtctgtgggacaggcagacattaaatacatgattaaaagtgtgagtggtagacaaagaagcacaggtgctactgaggatttgcaagaggaagaacctaatcttatctgggcgtcaggacaagacctttgaagaaaggatatttaaagtgtaatgtgaacatgagaacagggaaagaatgctgcagacaaatatatgcaaagatgcacaagtgagagatcatcgtgctttcgggaaacttcacaagaagcctggtgaggaaagggaactggcaagagatgttcacggggttgacctatggttggtgccttcagggtcaaggaccccaggatttaattcagatagtttgtgtcagttatctgatgctgggtaacagactactccaaaatttagtggcccaaacaagaatcattttttcaggattccgtgtgttggcttgtaatttttctacagatcttacctgggctcacccatgtggctgcattcagctggtacgtcagctgggggctggactaacccaggcctgttgggcctctggttctgtgaagtctttcatttggaaggaggcaagactgagctacttcacacagaatctgaggacagcgttccaagagggcaattcccaatgcacaagtgcttatcaagcctctccttgcatcatttgctgatatcctgttgcccacagccagtcacatggctaagcccagaatcactgtcagaggggatcccacaagggcatgtatggggggcagggtggttcattagtataacaatctatcacatacttcctctccaaatgggagagacgggaaggtcaaggagatgaaagaccacacttaaggcttggtcagaaccaacggattcttgtcctagctttgtggcatgtgtaagatgggtgaagttgcttactcactctaggtctcactttccttctctgtaaaatggaaggcttctaaatctcaactttagctgaaagccttgttatgcaagaatataggcgtcttccctctttagccatgaggcccacacagaagaaaatagacttcctattgaataggaagaagaattggagctagagcccccactccagaggcttttgcaaaagtgctatgaccttggggtagtaccaataaagggtgtggattcttaataatgagagatggttcagaattggaaagagtctccatctctccaggccactaaacagatgccccttgaaggcgtttttcatccagaagaatctgagctatcgctgtctgctggtgagagctgaggccaagaaaggtgggatttggggaacaaagagcttaccctaagcttgccagctccatacctgcctcatcacccaagatctactgctgagaactgcaggggaacatgcagagtgaaacctgggcaggtgtgcctttccctgtggggcttgttagcacttcccatgaagctgccttccctctgaggcccccagggacacgtttgtttgttaaatgattgacattgacctagttctgaccccaggctgcagctccctgggcatctgtctcctgggtctgcctgaccccaggggacaaagacgatgactcccggatcacaggctgcgtaaatacaggcaggtgtcatgccaggggccaggtgagaggaaggcaggtctaagctagagccacacctataacctaaaacacccatggtttgggagccactgagagatccctccatcccccaccacccaaaaaacagggtagattagctctttcaccttttctttccttcaaccattcattcattcaagaaacattattgctaggcaccgtgataccttagtagaacactaaagacattttaatagttttaaattcgatatgaggggaggtgagattcagtgtataattacagagtgacaagttctatggaagattttattttattttgagacaaggtatcactctgtcacccaggctggagtgcaatggcacgatctcagctcactgcaacctccgccttctgggttcaagtgattctcgtgcttcagcctcccaagtagctgggattacaggtgtgcgccaccatgcctggctcattttttcgtgtttttaatagagacagagtttcaccatgttggccaggctggtcttgaactcttgacttcaaatgatctgcccgccttggcctcccaaattgttgggattacaggcgtgagccaccgcgcctggcctggaagcatttaagtaagaaaatataacctggtctctctccctaaggaagtcccttgagctcagatggcaggatgtgtaggggataagtagataaacctgcaagtggagaggaggatggtccaggcagagtgaagctgatacaacagcctttgcgagagggaccatggctggtgtggggaactgagatatctgaggtcagtgtggctggcagcagagctttatgggttttttggttggttttgttttgttttgttttgttttgtttttgagacagaatcttgctctgttgcccagacgggagtgcagtggcgccatctcatctcactgcaatctccaccttccaggttcaaacgattctcctgcctcagccttccgagtcgctgggattacaggtgcctgccaccacacccagctaatttttgtatttttgtagagatggggtttcaccatgttgcccaggctggtctggaactcctgacctcaggtgatccaaccacctcagcctcccaaagtgctgggattacaggcgtgagccaccgcacccggccagctttacgtttttaatagcaaaggaaaactgtttacataggagggttaacagtcaaatttgcactttgaaaagatcactctggctgcagtgcacaaaacagattggacaggtcaagagaagatgtgccaaaagcagctgggaaactactgtgatattccagggtgagctgatgatagcttggcctagggacagcaaaagaaataaggaatgaatacattcaagagacttgtaaggagcttaattggacaggacttgttgatgcactggatagagaggtgaagaagaggaaggtgttaggatatgtctgatactgctgacctacagaacagatgggtgatgctgccatccactagtataaggaacactggaaggcagccaccagatggaaaggactgcgttgggtcagcttgggacatcctgaatttgaccttttttttttttttgagacggtcttgttctgtcacccaggctggagtgcagtggcacaatcatggttcactgcaacctcaaactcctgggctcaagcgatcctttcacctcagcctcctgagtagcagggaccactggtgcccatcaccatgcctggctaattttaaaaattttgtttgtagacatggaggtgtgtgggagggggtctcactatgttgtccaggctggtctcgaactcctggcctcaagtgatcctctcgccttggcctcccaaagtgctgggattacaggtgtcagcccctgcacccagcccttgaggtatctttgaggcacttgggtgcgtgcgtcgggagctcaaaggagaggaaaaagctggagttaggagcttagacatcaccaggatctaggtagatggcttagtgggagagggtcgttagagaggaagagggccaaagctcaagccttgagaaaggagcctgccaaggagacagagaacacaggacctgagaagatgaaggctgacttgaaaaacaccttcagtgtttggtgacatgaagtcaccggtaactgtagtaagggctgttttatagtggaggaatggaggcgaaacccagttttagaatgggttgaggaatgcgtgggaggtgaagaaatggagacagcctggctgagcgctttggttgtgaagggagaggagagaggggactggaggcggatgtgagattaaggaagttttttgttttgtttttgttttaatgaagagatgagcatctgtaaatgtcaacaggaagaattcagatttggtggagatggggccagggtggggtggctgtatctatgtgagggaaaagggccaaggaagaggtgggtgcctgggaagggaggagggacttgactccccagcacaggtggcagctcatgaggagcctggaaggggcagccgcaggcaggttggtgtggttggctgtgggagatgagggcagtctcatcccctggcccagttcagtgacccgagaggggaacccagctgctggggttcggcggctgcagcccctccaccgctgcctctgcccaggccgccctgaactgccctgtttcataatgagcaagcagtgcctcagccttgcctcgggcccgtcctgttaagagccccccccatccccccgcttggaatggagcaggggtggggaaaaggctgccgggactggccagggctcccattcgaagcgctgaaggacaggaccagaattacttctctcgggcgggagcacaccgcagagggcagacgggtcgacatttgctcgggagagaagcccaactgtttattctggttttcttttgtgtgtgtgtgtaaggtggagaggggaggcagagagcagtggggacctgaaatcgtagtattggggtgggtgagagggatgggagtggagggggacgttccttcctgggctcggcctggccccctttggggtggcagggggaaaggctggggctggaaggacagcaagagcgcccagggcctcagggctggggtgggagtaccctgcagagagctccctcctgcctcgcaggagaggaagggggaggcagggaggggcagggacagcaggagcccccaggtcaaagctccactccagtgtaaagcagtagccatatttgcttagaacttgccggatgttccctcccttgcacaggccacagagacttgttgtggaggagatcctctttctttggggtccagtgatagcagggagccctgtaatatgaggccagccccccatgctgggagctgagtcctgagaatggggaagagggttcgtggggagagggtgggtgaagaagccttcttaatcattaacctggttgatttcatctgaactgctgagcctcccagctctattgattttctctgaaagcacagcatctggagctggtggctgcccagagaccggggagagagaccacgggtagaggtaggggaagaggggcagggaggggaatggaaaccaggccaggagtggggggctgggaaggagggaggagacaaggtctgagggccgggagattgtcagaggagtctttggggatgtgaggaggccaggaggtctaagcaggcactgggggagggcacagtcagcacagccacagaggcaccacggagagcaggaaggagccagagaggatctggcagagaggacgaaactgaagtccagagaagcacagtgatctgctcaaggtgacagggtcagggcctgcaccaaaactgaggtcagttgatttcactggactgaggagagaagatacagaaatgaaggcccctggggcagaggagaacctgaggtgatggaaagtcggcaagaggcgagatgcaacttacaaattaccatttttctgagggtggggcctttcctttttttgcctgtgaggatatagtagactttcaaaaaatggctctggtctgactgaaggtggggtcaggccatcaaaggaggaagaaagggccaaggagaagtgatgctagaggccgggcatggtagctcacgcctcagcactttgggaggccgaggcaggtggatcacctgaggtcaggagttcgagaccagcctggccaacgtggtgaaacctcgtctctactaaaaatacaaaaattagccctgcgtggtagcgcacacttgtaatcccagctactcaggagactgagacaggagaatcacttgaacccaggaggcggagatggcagtgagccgagatcgcgccattgcactccagcctgggtaacaagagcgaaactccatctcaaaaaaaagaagtgatgctagaaagagctggacagaagggaacaccaagacacctgtccatcttcacttagccaaatccagggccctgacaagatgggttttcaccaggacattttatggggctcctggctccccactatttctgacagtaggattcctaggtctgtgtcacctgtgagacagaaggggagccacattctggtggcagggacagaaccacacgcatggacactgatgtgccatcctggtccccacaggtcccctgaccagtacagctcctagaataggtcttctctgagctggaggggataagccagactgcttcctgggagaattgaaaaggagcagggggccctgaagacagaatcagtcaggtacacagtgagcaggggtgatgtgacggtagagagacatgggaacagagacagcacacacaccacatagctctgagatgacgcacaaaatgttatgactccatagactgaagcagacacagcgtttcttttcttttctttttttttttgagacggagtgttgctctcgtccaggccggagtgcagtggtgtaatttcggctcactgcaacctccgcctcctgggttcaagtgattctcctgcctcagcctcccaagtagctgggattataggcgtgcgtcaccacacccggctaatctttgtatttttagtagagatgggattttactacattcaccaggctggtcttgaactcctgacctcaagtgatccacccgccttagcctctcaaagtgttgggattacagttgtgagccactgtgctggcctcagacacagcatttctaaggccatgttgagggtgccaaaggaaaccaagatattttaccccagaatatactactttgacgtattttgagtcggctgtcagagggccagcacacagaagtggccctgcaaatctggcttttgagggagatttgcatctgcagagaatctgcattgatgcaacctggctttctctgaggccctccctggtccaaatctaggaaagattaactgaaagtctgacatgtttaaaggtctgaaagacacatacatcacctgttttctctgaggggtgttacctatgaggtttcattcatataaaaagaccacttttactggcctggcctccgtttatccctcccataactatttttgccaaagtccaagtcccttttttttttgttgttgagacagggtctctgtcgcccaggctggagtgcagtggcatggtctcagttcactgcaacctccacctcccagggtcaagtgagtctcatgcctcagcctcctgagtagctgggactacaggcatgtgccaccatgtccagctaatttttgtatttttagtagagacagagtttcgtcctgttggccaggctggtctcaaactcctcacctcaggtgatccacctgcctcagcctcccatagtgctgggattacaggggtaagccactgcaccttgcccaagctcccattctttctgtaacctcaagatggtataaaatcatcaaccatctggctatctctttgacttcctatatttttttgactcccttgcatattagttcttctactaatctgccttttttcagttggtttttcagcagacctgcagagggcacaggggaagtgttcctttggcccctgcagcaccacaggaccccaggtcctgtctgtggtcgtggtggtaacgggtgccagcctggaccagtcctgcatcgtggagcttcactctggacattctaaggggcagactgtggctggggcgtgagggataataaaggtggtgtgaccgaagcctcctgtctatactgtcttttctctcccctttctctgacagctcaacatcctggtggatacaggcagcagtaactttgcagtgggtgctgccccccaccccttcctgcatcgctactaccagaggcagctgtgagtcctggggagagcccgggggaagtaccttttccaaggatccagggctaagaagggtcaggggaggggtacagagagaaagagttgatcctcagattttcttcttgccagggaaggggaagggcgaaaaaaagacagtgaccaggagagacagggtgaagtgggtggtgagaggagctataccatgggaaagggtgaattgagaggtagccaggaagtgcttcagtgctgagacagggcagcctcctgtgggagggaaaggaagaagagcccatagctcacagaacaatcttagggggcccattttctctgcctgaatggggagacgaaaaccccacatcccctcggtgtctctcagttctctaacaccagctaagtctaagctgaacaggcctcagtgacggctccccttgctgtgttcttacccaggggccactctaggtggctttgcatagtccaaggacatgaaggaaagggtctttcataaacccctctgcctagaccagtatcagaactgaaagctgaaatatctcctccatgcaccacccagggtgccaccagttggattcagcttactggtgaaaggggggttgaagaggactggtgaaagtgggggactggtgaaaggggggttgaagtgggctttaagataagaggcagtgaggggtaatctggaagcccccttagcataaaagcaggaagaagaagggatgagaggacaccaatatctgagacatcagtgtgtgcaaacgtgagtagaggcttaaatcctatccttggacttgtaggcagctgcaaaacgcaccttccctgtttcctctaatgtcccaatctaaaagaagcagtcagggaggagggtgcaggtaggatcgatgaaagggcattcactccagttcctcgttccagttccatcactgcccccaccacacacagaagccctggttagtggtgtgattaaacacaggtggggctgccacatgttgagcacgtttcacagaagtggtgtgtaataccaacctgcttttctgagatgcttgaacaaaccccttctctagaacttgctgtagaggttccacattcaccctgcctggcactttctctaccactcggatggtaccactaggttccaaggcagtaagagagtcaatggttccttttctcggggagcttgacggagccagagggcggaagagatgcccactagctgtccctgcagcagcagcagcagcaggcacaatgcacaaagcccaggcttgttcttcacagggcctgagctcaagatctaggaatatgagcaatagataggagagcaagcctcaccaatggttcccttcatctatctgcaagcccactttacactctgttctgggtggtgagtctagggatgttttgctgagcagcctgaaagcagactctaggattcccctgagatgagataaggtggtgtttgggagtaagtttaacttagatccttataccagttgtggttatgcatccacagatctctgccttctttccacaggtccagcacataccgggacctccggaagggtgtgtatgtgccctacacccagggcaagtgggaaggggagctgggcaccgacctggtaagcatcccccatggccccaacgtcactgtgcgtgccaacattgctgccatcactgaatcagacaagttcttcatcaacggctccaactgggaaggcatcctggggctggcctatgctgagattgccagggtgagaggaacagggcttggccctacacactctatgcacactgcactatacagagaaggaattaggagagagaaggggaattagcagaaggagggcaacaatcagtttaaaggattatttaacaggggtatagggtggcagtctaaattttagccctatagagggcagaaccatagtgacagaagctgtgataggtacaagaataggctgtgctttctatgtactcttaagatctttttttttttgagacggagtttcactcttgttgcccaagctggagtgcaatggtgcaatcttggctcactgcaacctccacctcctcggttcaagcgattttcctgcctcagcctcccgagtagctgggattataggcgcccaccatgacgcccggctaattttttctatttttagtagaaatggggtttcatcatgttagccaggctggtctcgaactcctgaccgcaggtgatccgctcacctcggccttcctaagtgctgggattacaggcatgaaccaccgcgaccagccactctaagatctttaataaaggcccccataaatttgaagcaggttaggcatagggggatcaaagatatatgaacctggccaggcgtggtggctcacacctgtaatcccagcactttgggaggccaaggcgagcggatgacctgaggtcagaagttcaagaccagcctgaccaacatggtgaaaccccatctaccccatctctactgaaaacacagaaattagccgggcatgttggcgcatgcctataatcccagctactcaggaggctgaggcacgagaatcacttgaacccaggaggtgaaggttgcagtgagccgagatcgtaacattgcactccagcttgggcaacaagagcaaaactctgtctcaaaaaaaaaaaaaagatctatgaatctgtgaacctatcaatactgtcctgtttgcattgccagggctcctgctaacccttcctctgccaaatctcagtgccttaagatggtctttcccaaggagcatcccccaagccttcaaatttgccttccagtttagacaggaagctggcctctgcctttagggccgtatgaggactcactccttgtctctttctgccaaagcctgacgactccctggagcctttctttgactctctggtaaagcagacccacgttcccaacctcttctccctgcagctttgtggtgctggcttccccctcaaccagtctgaagtgctggcctctgtcggagggagcatggtgagtaggtcctcagagaggggaggtcctggcattgagggagagatgggtgccatcctctccccttcctgaaagctacaccacagttttggctccgatacttagaatcaggaggaacctctttatattccctacccttactttatttttccattcttttcttttttgcgttattccagaaaggaatcaaggcacctatggtaaacttggaaaggaaggcaattaggaaaatttcaaaggaaatgaaaataagacctgttgaattaaaattattcagtttgatggtcagaaggcagagatataagaagtttgtctatttattaattaattagaacaatggtgaatggttctccaataagcagagaaaataaaacttataatataaacaaataaccattcattcaacatttattgtggcagtttagatttaaataactttatatcaagggctgtatgattctgaaacaaataattaaaaatcccggaaagtcttttctcctgaacacatttaagaaactagaaatcactttgggtatgatttgtttagaagcaggaagatgaaaagggtagcctgtagaagaccttgccaccccaagaaatcactgatcttattgcttggtccttgggggactcactctccttctgtgccaggacacgggtacctgcctctttttttccctagatcattggaggtatcgaccactcgctgtacacaggcagtctctggtatacacccatccggcgggagtggtattatgaggtgatcattgtgcgggtggagatcaatggacaggatctgaaaatggactgcaaggaggtaagaaaaccaagggagagcctgggaacataagggggtaggcagtacaatgtgaaggaagactctggttatcatgttgggaggatgaggcagaggtaataggacctgcagaaagggttggaagttgagcctagaacagtcaggggcttaatggtcacacagcaggatctgcggtttggggcctagggactggtagtgaaaaaaaaaacatggaactagttctgatgtctggactctagtcactgccttgcttcgtagccttgggcaagtcttttgtgagacagggtgatagaatgaagagtcttgtctttggagtcaggaagacccagatctgaatctagctctgatttgtactagctatgtacccttaggccagttactattctgtgtctcagtttccttatctgcaaaacaggtaaaaacaactttctcagaatatcagagataatgtgtaaagtgtttatctctgtggttggcagtactcaataaaaggtaactaaatcatttatgtcttccttccctagattcttatgtatgttaaattagaatagatataaatgtactaagaaaagttaaaagcggccgggcgtggctgtaatcccagcactctgggaggccaaggcgggggcagatcatttgaggtcagaaattcgagaccagcctggtcaacatggtgaaaccccatctctactaaaaatagccaggcgtggtggcaggcacctgtagtcccagctacttgggaggctgaggcaaaagaatggtttgaatccaggaggcagaggttagagtgagccgagatcacgccactgtactccagcctgggtgacagagctaatactccatctcaaaaaaaaaaaaaaaaaaaaaaaaaagaaaagaaaagttaaaagcactaaacaaggtatttttattttcaagtttggagactacctgcccacccaagattaacaagaataaacatttaccaagtgccttctctctgctgggcacgattctaagtgctttacattgctgatttatttaatccttacaataaccctttgaggtaggtgctatttttatcctcactttagagatgaaggaactgaggcacagaggttaacttgtccaagcaggtacacttaggaggtgccaaagccaagatgccaacccagctggggccccagcagtaaccccctactgcccagagcccagcatcaaaaaccttttgactcttttaactctctcttttccctcttagtacaactatgacaagagcattgtggacagtggcaccaccaaccttcgtttgcccaagaaagtgtttgaagctgcagtcaaatccatcaaggcagcctcctccgtgagtggactaaggatgggggtaaaagagatggtacagtgtcagagggaggcggtgagagtcacattcttcagcaacagccaagatgtctgcacttagacccttctactcagagctcttaaaacactcttcccctagccaggcgtggtggctcacgcctgtaatcccagcactttgggaggccaaggtgggcagatcactaggtcaggagttcaagaccagcctgaccaacagggtgaaatcccatctctactaaaagtacaaaaattagctgggtgtggtggcgcacgcctgtaatcctagctactcagggggctgagacaggagaatcactttaactcaggacggtggaggttgcggtgagccatgattgcgccactgcactccagcctgggcaacagagtgagacactgtttcaaaaaaaaaaaaaaaactcttcccctttatggctgtcactttgctcatcacacaatcccccggtacaaaagtttgacatcacactccctctctcttcctgtaatcctctggttggtttacccctccccactttagatatttcactggaaaagcaaatgaagggcccagttaatgtatctgaacatgggaggggcgagatgataaagaggcttttcctcattgttatccccttcttgccaacacagacggagaagttccctgatggtttctggctaggagagcagctggtgtgctggcaagcaggcaccaccccttggaacattttcccagtcatctcactctacctaatgggtgaggttaccaaccagtccttccgcatcaccatccttccgcaggtatgtcccagcctgagtcagggggatctctcttaaaagtacacactgggagacagtgagcaggtatggcttgccagaacttggaagacaaaacagatgagtagtgtccagcagtaaaggggtctcagaaaacccgttagagctcagggatggtaaagggaagggcatagatgcctacaaggcagagatggggtgaaggagagtgaggaagacactcaccctgtgattgcttacccctagcaatacctgcggccagtggaagatgtggccacgtcccaagacgactgttacaagtttgccatctcacagtcatccacgggcactgttatgggagctgttatcatggagggcttctacgttgtctttgatcgggcccgaaaacgaattggctttgctgtcagcgcttgccatggtgagagtgccagggctgagggtttggggtcagtctctccatattttccttgtcaaacaacagttagtatacctgggtccctgtcagtttaggggagggtagtaacagttgcctcaaacccaagtcaacagttgtgcaaaagctagtgtcaatgctcgtcctttttttgtactgcctgccataatgaccactgcctggattggtaacctctgttggaaacccagagcagcaagagttacctgggtaccttgggaagctcttgatgcaagggtagcagactgagtctatagtgaccctgtcagctgccacatggtgaggctgaatgctacttcagaaaggtggcagggttttgcagttggatttcagcagcagaaagttaagtttactagatttggcttttggtcaagggggtggcttttggtcaactcagaactactgacttttagttatcactcctaccagctgggtatacaaggaagggctgctgctcccagtgacttgggaagggagacaggcctctacctggtgctggcttcccagcctgctcctaaatatctcctgggaaggagattagataacttctgcatgggctaatttcaaggcctcactatcaggaagttctttttgttaactcctctatgacaatgagagctgtccattcacatttgccctctccccagtgcacgatgagttcaggacggcagcggtggaaggcccttttgtcaccttggacatggaagactgtggctacaacattccacagacagatgagtcaaccctcatgaccatagcctatgtcatggctgccatctgcgccctcttcatgctgccactctgcctcatggtgtgtcagtggcgctgcctccgctgcctgcgccagcagcatgatgactttgctgatgacatctccctgctgaagtgaggaggcccatgggcagaagatagagattcccctggaccacacctccgtggttcactttggtcacaagtaggagacacagatggcacctgtggccagagcacctcaggaccctccccacccaccaaatgcctctgccttgatggagaaggaaaaggctggcaaggtgggttccagggactgtacctgtaggaaacagaaaagagaagaaagaagcactctgctggcgggaatactcttggtcacctcaaatttaagtcgggaaattctgctgcttgaaacttcagccctgaacctttgtccaccattcctttaaattctccaacccaaagtattcttcttttcttagtttcagaagtactggcatcacacgcaggttaccttggcgtgtgtccctgtggtaccctggcagagaagagaccaagcttgtttccctgctggccaaagtcagtaggagaggatgcacagtttgctatttgctttagagacagggactgtataaacaagcctaacattggtgcaaagattgcctcttgaattaaaaaaaaaaactagattgactatttatacaaatgggggcggctggaaagaggagaaggagagggagtacaaagacagggaatagtgggatcaaagctaggaaaggcagaaacacaaccactcaccagtcctagttttagacctcatctccaagatagcatcccatctcagaagatgggtgttgttttcaatgttttcttttctgtggttgcagcctgaccaaaagtgagatgggaagggcttatctagccaaagagctcttttttagctctcttaaatgaagtgcccactaagaagttccacttaacacatgaatttctgccatattaatttcattgtctctatctgaaccaccctttattctacatatgataggcagcactgaaatatcctaaccccctaagctccaggtgccctgtgggagagcaactggactatagcagggctgggctctgtcttcctggtcataggctcactctttcccccaaatcttcctctggagctttgcagccaaggtgctaaaaggaataggtaggagacctcttctatctaatccttaaaagcataatgttgaacattcattcaacagctgatgccctataacccctgcctggatttcttcctattaggctataagaagtagcaagatctttacataattcagagtggtttcattgccttcctaccctctctaatggcccctccatttatttgactaaagcatcacacagtggcactagcattataccaagagtatgagaaatacagtgctttatggctctaacattactgccttcagtatcaaggctgcctggagaaaggatggcagcctcagggcttccttatgtcctccaccacaagagctccttgatgaaggtcatctttttcccctatcctgttcttcccctccccgctcctaatggtacgtgggtacccaggctggttcttgggctaggtagtggggaccaagttcattacctccctatcagttctagcatagtaaactacggtaccagtgttagtgggaagagctgggttttcctagtatacccactgcatcctactcctacctggtcaacccgctgcttccaggtatgggacctgctaagtgtggaattacctgataagggagagggaaatacaaggagggcctctggtgttcctggcctcagccagctgcccacaagccataaaccaataaaacaagaatactgagtcagttttttatctgggttctcttcattcccactgcacttggtgctgctttggctgactgggaacaccccataactacagagtctgacaggaagactggagactgtccacttctagctcggaacttactgtgtaaataaactttcagaactgctaccatgaagtgaaaatgccacattttgctttataatttctacccatgttgggaaaaactggctttttcccagccctttccagggcataaaactcaaccccttcgatagcaagtcccatcagcctattatttttttaaagaaaacttgcacttgtttttctttttacagttacttccttcctgccccaaaattataaactctaagtgtaaaaaaaagtcttaacaacagcttcttgcttgtaaaaatatgtattatacatctgtatttttaaattctgctcctgaaaaatgactgtcccattctccactcactgcatttggggcctttcccattggtctgcatgtcttttatcattgcaggccagtggacagagggagaagggagaacaggggtcgccaacacttgtgttgctttctgactgatcctgaacaagaaagagtaacactgaggcgctcgctcccatgcacaactctccaaaacacttatcctcctgcaagagtgggctttccagggtctttactgggaagcagttaagccccctcctcaccccttccttttttctttctttactcctttggcttcaaaggattttggaaaagaaacaatatgctttacactcattttcaatttctaaatttgcaggggatactgaaaaatacggcaggtggcctaaggctgctgtaaagttgaggggagaggaaatcttaagattacaagataaaaaacgaatcccctaaacaaaaagaacaatagaactggtcttccattttgccacctttcctgttcatgacagctactaacctggagacagtaacatttcattaaccaaagaaagtgggtcacctgacctctgaagagctgagtactcaggccactccaatcaccctacaagatgccaaggaggtcccaggaagtccagctccttaaactgacgctagtcaataaacctgggcaagtgaggcaagagaaatgaggaagaatccatctgtgaggtgataggcaaggatgaaagacaaagaaggaaaagagtatcaaaggcagaaaggagatcatttagttgggtctgaaaggaaaagtctttgctatccgacatgtactgctagtacctgtaagcattttaggtcccagaatggaaaaaaaaatcagctattggtaatataataatgtcctttccctggagtcagtttttttaaaaagttaactcttagtttttacttgtttaattctaaaagagaagggagctgaggccattccctgtaggagtaaagataaaaggataggaaaagattcaaagctctaatagagtcacagctttcccaggtataaaacctaaaattaagaagtacaataagcagaggtggaaaatgatctagttcctgatagctacccacagagcaagtgatttataaatttgaaatccaaactactttcttaatatcactttggtctccatttttcccaggacaggaaatatgtccccccctaactttcttgcttcaaaaattaaaatccagcatcccaagatcattctacaagtaattttgcacagacatctcctcaccccagtgcctgtctggagctcacccaaggtcaccaaacaacttggttgtgaaccaactgccttaaccttctgggggagggggattagctagactaggagaccagaagtgaatgggaaagggtgaggacttcacaatgttggcctgtcagagcttgattagaagccaagacagtggcagcaaaggaagacttggcccaggaaaaacctgtgggttgtgctaatttctgtccagaaaatagggtggacagaagcttgtggggtacatggaggaattgggacctggttatgttgttattctcggactgtgaattttggtgatgtaaaacagaatattctgtaaacctaatgtctgtataaataatgagcgttaacacagtaaaatattcaataagaagtcaaa

SEQ ID NO: 57 - DNA, 50492 bp, Homo sapiens
  source 1..50492: mol_type = genomic DNA
agacattgctgtctggtgctcctctctcagtggccatcatgtctttgacatctgcttaccagcataaattagcagagaagctcactatcctgaatgatcgcggtcagggggttctcatccgtatgtataacatcaagaaggtaagcatgaacaatgggactagtactgattattccaacaataatagggcagggaaccctgaggcggcaggtgcagcagttagactcccacctttttttccactgcttttccactgactataatctacataatcactcagattatacaggccagccagttcaggaaggcagaagtggaggcttcttttcaaggcttcccctttctagatatgattcttgccccaacgatggcatctgctttcctctggggatgggggtgagggtggggatggggaaacaacagtggtattccaagtgacttggataaaggtctggggtccaaccttctgggttttattatttattgttgatcctctacactctgaagagatctgaagctgggtctctggcaaaaacttttctgtggaagtgcttccctaaaaggaaaaaaaatagataattaggtatttagattaaaaagggtaggtgtcttctgagctgctcctggggtagttcatgctgtggtggttgtgtgtgtgtgtgtgtgtgtgtgtgtgtgtgtgtttagaataggaactgaggaattgaaagaagctagtgacaagaggtgggctaggggctgggcaaaccataggaagtaaagagataaagacaggggtgtttatggggagttcctggcatagaaaataggggactttgggggagggagcttttgtgttttttgtaataaaacaaatcaccaggaacacggtttctctgtcaccatgaatcctgtaaatgccctttgggataagatacttacatagtgaacaaaattgtgacactgaatcttgtacaaagtctaactcctgagcagctgcttttcttgttccttccggcttcagttgaggggcggggaaacagcttcctctttgtgctggggccaagcaggcattaaactctacccatcaagacaaaatgcctaggttgttatttcgctcttagatacttggcttaatgtcttggaattttttcttgacctactcttatgctttttatttttatatttatttatttatttatttatttatttattttcggagtctcgctctgtcgcccaggctggagtgcagtggcacgatcttggctcactgcaacctccgcctcccgggttcaagcgattctcctgcctcagcctcccaagtacctgggactacagttgtgcaccaccatgcccagctaatttttgtatttttagtagagacggggtttcaccatgttggccaggctggtctcgaacttctgaccttgtgatctgcctgcctcggcctcccgaagtgctgggattacaggtgtgagccgctgcgcccagcctctcatgctttttaaattagttcccaggttgccttttcctaagacagattatgagaatgaatgttgcaagaagaggtatgtttctgaggaggaggagaaagggttgaaatatatatggtttctctctgcagacttgttcagaccccaaatctaagccacctttcttactggaaaagtccatggaaccatctctcaagtatatcaacaagaaatttcccaacatagatgtccgaaacagcacggtgagaacttggtccttctctcctttctctgaataattctctgcttgaatggctgaaattctcctcttttgatgcctctcttcaaacttggcaggggatggagtagtctttttttattaatagttttccaaggctcaaccacagggcttcaggttgttgtagagctttaagtcttgagcattttgagataagatgggattcttccagcataagctggagcgaatcatcaccccttttccattgcaagattcatgggaaaacattgtttttgtacaagacagctctatcaacccagcagggtacatgtattttattgtttctgtttcccactcactgtttccttgctgtttgtcttagatttctgcatctaatgggatatctctacttttcccttattaaatgttaaccctagatttttcacccatctttgtagcatctttgaattctgtttcttttgactttgatataaatagtatatctgttcatctgaaagggtgcttaaaatttcctctcatttagccctctgtatctagtcaggatcacatgcaaccattctacctagatagacaatctcctttgtttaaagaccttcagagcactgaagcgtttctaacttcctctgtcagtatatttcaactctctttctttttcttttcttttctttttttttttttttgagatggagtcttgctctgtcacccaggctggagtgcagtagcacaatcttggctcactgcaacctctgcttcccaggttcaagtgattcttctgactcagcctctcgagtagctggcattacaggcgcccgccaccacgcccagctaatttttgtatttttaatagagacggggtttcaccaggttggccaggctggtcttgaacccctgacctcaggtgatccgcctgcctcggcctcccaaagtgctgggattacaggtgtgagccactgcgcccggcctcaaccctctttaagaatgttttaggtataaccactgttcttcttgagttatttggatcaattgtcttattttgcacttttttattgttttgttttgtgtttctctcagcaacatttaggaccagtacatcgtgaaaaagccgagataattagattcctcaccaactactaccagtcatttgtggatgtcatggaatttcgggtgagctctcttgagccgtttccaatgtaggcaaggtctttcagaggctattctttctttagatgttcatgtatttgcttaaaacaagttcttgaaaaaatgagagagatgtactaatatggaaggatatctaagttgtattgttaaatgaaagcaaatttcaaaatagtatatgatacatcacatttctattttaaaagagtatgtatgtatatgtatttagtaaatatctaggaaagatctggactattttacattaaactgttaaaaataactacctttggggactgattatgactggcttcaatttagtaggctatgcatgttttttctattttaaaaattatggtaaaatacacataacataaaatttactgtcttaaccatttttaagtatacagttcagtggtactaagtatattaataatgcaaccatcttttcaccttgtaaacctgaaactctctaccctttatgcaataattccccatttccctttctttccagccccttgccatcacaattctactttgtttttgtgattttgactattctaagtaccttatataagtagaatcataaagcatttgtctttttgtggctggcttatttcatcagcctaatgtccttaaggttcatccctgttgtagcatattgtagaatttcctttttaagctaaataatattccattgtatgattatactacattttgcttatccgatcgtatgttgatggacacttaggttgcttccaagttttagctattgtaaatgatgctgctatgaacgtgggtgtacaaatatatcttcaaaaccctactttcaattcttttgattataaacatgaaagtggaaatgctggatcatatgataattctattattaacttttttttttttgagttagggtctcactctgttgcccaggctggagtgtagtggtgcaatcacagctcactgctgcctcgacctcctaggctcaggtgatcctcccacctcagcctcttgaatagctggggctaaaggcacatgccaccacacctggctaagtttttatattttttgtagagatggggtatccccatgttggccagggtggtctcaaactcctgggctcaagctatccacccacctcggcctcccaaaggctggactgtgccggcctatttttaactttttgaggaactgctatactgttttccacagtggctgtactcttttacattctcaccaacggtgcataagggctataattcctccacatcctcgccaacaattgttatttcgtttttttgacagtagccatcccagtgggtgtgaggtattatctcatctaagtttttatttgaatttttgctaatgattagtgataatgagcatttttcataggcttattggccatttatatatcttctttgaagaaatgtctgtttcattctttgaccatttttgaattggattttttgtgtgtgttgagacttaggagttctctatacaggttgagtattccttatggaaaattcttgagaccagagtgttttgaatttcatatgtttgcagatttcagaatatttgcattaggcagttgagcatccctaatatgaaagtctgaaatttgaaatgtttcaatgagcatttcctttgagtgtcttgttggtgctcaacaggtttcagattttggagcattttggattttcgggttagggaagctcaacctgtataaactatatatctttgcattatttgagctttaaaaatttcaagtatttttccacaatattttatacaaacctactgtaaaatttctagtatagtacaatgaatattgttatactcttctcctggatctcctaattgttagtattttgccacattttcttatccttctctattttttaatgaactatttgagttagcctcatacatcatgacatttcctttcccaaatacttaagcatacatttgctaagagcaagaatattttcttacccaaccctaatataattatcatactcaggaaatcatacacaggaaatataacatacacaggaaatatatcatacacaggaaatataacattatggctgggtgctgtggctcacgcctgtaatcccaacactttgggaggctgacggggatgaatcgcttgagcccaggagtttgagaccagcctgggcaacatggtgaaaccccatctacacaaaaaaaaaaaaaaaaaaaaaaaaattagctgggcatggtagtgagtgcctgtagtcccagctgcttaggaggctgaggcaggaggatcacttgaacctgggaagtcaaggctgtagttagccatgattatgccactggccactgtactccagcctgggtgacacagtgagactttgtctcaaaaaaaaaaaaaaagaaacaaaaccccacccaaactaatatacagcccatattcacatttctccagttgtctcaaggataatacattggatttagttatgtctccttcatctttaatctagaatgatttccagcctttgtcttgtatgacactgacatttttgaagagtctgggctagttatttttgagaaatccttcaatttgaaattgtcttattgttgatagtttttgggagcaatactacatggatgatattttatttgaattttaaataatgagcatgtattatttttataaacataaaaaataaaaattaatatgatgtttttgaaagaaaaattgataaggtattattaaaattttaaaaattaatgtcgtaattttacatttagaaatttgtcataaggaaacagaattgtttcatggggaaataaaaaaaggaaacaaatgcaaagacatatgtataagaatatactccattgcattatttatgatagttacaatgtgataattgatatatccaataaataaaggtttggttaaaagttcagagtatgtgcccacaaatgaatattctgtagctgttaaagtatacacacatatatatatatacacacacatatatattttttcttttcttttttttttttttgaggcggagtcttactgtgttgcccaggctggaatacagtggcgtgatctcggctcactgctgcctccgcctttgggttaaagcgagtctcctgcctcagcctcctgagtagctgggattacaggcacgtgccaccacgcctcgttaatttttgtatttttagtagagatgggggatctcaccatgttggccaagctggcctcgaactcctgacctcaaatgatccacctgcctcggcctcccaaagtgctgggattacaggcatgagtcactgcacccagccaataatatattttttatattaattggtatagaaaatgttcatcatatgttgtttaatgtaaaagcaaattgcagtaagacagtttaagacagatgtaagatgtaagatgtccctaaaatgtatatttacataggtaaatatgcatataaagaagattggaatttctgatcggtgggattatagtttaaaaaagctagttaaaattaaacttgtcggtattttctagttttttctacaataaacatgtattatttatgtattcaagaaataatgcaaattttagccctctgagcaacccaagcttgtggtggtgttatagtattttttcagatgatacaagaataatgtgttctgtgcctaccctaggaagcaaatccaggatattcagtagatcacatagtgaagagagaagtgaggacaagaaggactgtaatgtatgaacgagggtcaggtcagagagtattcattgtggaattgagagtagtggttagcaagagggtaggtgctggtggaggcagtgggaagaatgctggaagcacataaaaaaagtctcttactgagaaaagttgaagggcaaaggagattttagaacaccttctggttgctgcagtggtaaataaagttctgagcccaaggtgtttggtacggcttgtttaggaaaggaggggaaatagggacattgaagtatgatgcactgttaagtaggccctgaattagacagacttggtttcaaatctcagctttaccacttacaaactgtatgactttagataagaaactctttaaattccagtttccttatctataaaatgaggaaataagatttactgtgtgaggcgtctgtgagaattaaatgagataatgcatggacaacatctagcttggtgtttagcatatagtaaggcaatagaccaacacatgttatttccgttcccttctgattcttgtctgtagagaataagacctgcgtagtgacattggttgtgtgagtggctgaaagtgaatttcagctatattccactggaatttgggtgtaggctggagttgtagaaaggcattcctagcaaatgaggaagtatagacctagacagaggtcatgtagcatacagggaaaatcaaaagctctggattcaagttctagtaccattccttactagctctatgatcttaggccagtttctttatttttctgcattcattcagcaagtatttatgatgtcacccggctccccgccacattgcggaaacaagcatggagacggggcactgcctgcacagggcacattttgggggacagctaccctgtctggtgtgttaggcaagtttcttaatggctcttggccttggtttccttatctgttaatttagacacagcctttttttggaagataagtaagaagcacttttcctacacattttaataaattttgacaagtgtatatgcctgtgtaaccaccactacaaagtattgaatatttccatcaccccaagggttccttgtgccttttttttttttttttagcttcagccaatccctacccttcacttctggccccaggcaaccactgatctactttctagaatagatttttcttttctagcagttcaaataaagggaaactatacagcatgtattcttttgtgtctggctcctctcactcagcatcatgtttctgagattgatctatgttgttgcatgtatcagtgattcagtaccccgtcctcccttttttttttttgagatggagtttcactcttgttgcccaggctggagtgcaatggtgtgatcttggctcactgcaacatctgcctcctgggttgaagggagtcccctgcctcagcctcccaagtagctgggattacaggaatgcgccaccacacctggctaattttgtatttttagtagagacggggtttctccatgttggtcaggctggtctcgaactcccgacctcaggtgatctgcccaccttggcctcccaaagtgctgggattacaggcgggagccacggcacccggcctcagtccccctttttgctgagaactattccattgcatgggtacaatttatttatccatttacctgttgatagacatttgagttgtttctagttttaggccattatgcgtaagttgctacaaactttcaagtacaaatctttgtggggacatatttttcatttcacttgggtaaatctagaagttgaattgctgaatcatatggtaagagtatatttaattttataagaaaccgccaaaccttttttcagagttgttccattttatcttcccaccagtaatgtatgagagcttcagtttctctatattctcatcagcacttgctattattagacttacattttagttattccagtgggtgtgtcatggtatcttattgtggtttaaatttgcatttccctgatggctaatatcattgaacatcttttcatgtgcttattataaatatatatatatattttgagacagagtcttgctctgtcacccaggctggagtgcagtggcatgatctcagctcactgcaacctccgcctctcagcttactgcaacctctgcctcccaggctcaaacaattctcgtgcctcagcctcttgagtggctgtgattacaggcatgtgccaccacacccagctaattttttttatttttatttttagtagagatggggttttgtcatgttggccaggctctcttgaactcctggcctcaagtgaacctcccacctcagccttccaaaatgctgggattacaggtgtgaaccgccatgcttggcatcatattttttttatggtattaagtgcctgttcaaatcttttggcaacatattaaaaaaaaaaaatatatatatatatatatatatatatattccttaatctatcaattttacttttttagaaatgaaagtaccaatattcagtggagaaggctaggaactaggaacaaaacgaatcagtggaagaaaggctgaatgaattgtggtataccatgggctattatgcagctatgaaaaaggatgcattcatgctctaggagataactctgagaacttttggcaagtaggagtgaatgagcaaagcaaaattacaagcagggaatattacctcaattttgtaacacaaataatgaccaaaaaacctgtttctctctctctcttttccttttataatctaatagtattatataaatagggagaaaaataagaaaatattataagaaaaataatatcaggttgctaaagtggtttacctgggcgttctgcaggatggagtgtgggtgctgatgttgggggaaagaagtgtctgcaataaaagtgcatattaatttaggtaaaattatgtgtgaaaaggagaagaatccctatcatactagaatgagagttaaatgaagtatatgcaaattacttggtaagtacctcacacatagtgaattgtcagtaaatagaaactcatggaaaattagacagtattcccgtttgttaataattaactcctgagaacaggagatagaatccaggaacagacttacttcgtggtttgtcaatacgaatcgtttgatttttggcatttttgaagctacctattagataatctacattttacaaccttttttaatttggaggaatggggcatagggatgataagctcaggaaaagtgtgtgtaatgtaatagagacttgtgcctgtggaaatgtaggcatttggcagtgtaggtcataggggcccactggtggcttactgaggaggaacttcctccctctttttcacagtgacttttctctgttacttggtggctttctaggacctctaagggagaggtccctttccctcaagttctggtagtacgtcaccttctctttgattttttattaattcttgtcttcacttccacccccaggatcatgtatatgaacttctcaacaccattgatgcctgccagtgccattttgatatcgtaagaacctttgcaattctcttctatcgtagagtcaaagaaaaggccaggtctaggttgggaggtctaggtctactcacaggatggggtgggaagggactggaaggatggctattttgtttattccttctcaggactactataattgttttgtaaaaagtgctgaagtgaaaatatatttacatgttaagcagatcagcaatgtgatttaattaattaaaaaattacataaaaatcttcttcaccttttccatctcctaaaagctaccttatttcctggcctccttgtatattgagctcacttttagcccctgacttttgttccaattttcttattcttcttttcaatcctgtcagttcctacttctaaatagattcactcggaatatattgagcactgtccagagtggttggggaaagaaggagatccaggttaattggccatgctgtccttgggttcctatgtattttccttgtagaatctcaactttgatttcactcggagttacctggacttgattgtaacttacacctcagtcattttacttctgtcacggattgaagatcggcggatactcattggcatgtacaattgtgcccatgagatgctgcatgggcatgggtgagttaaggcgagagtattatatgaagagtctcatacatggtgctatgatgtagagagtccctcatgcaaaggaaattgatgccatgatttcttatatgagaacctataatctacattgacccaggcaaaataaggtacacttttacatattcagttgactctgaaacaacacgggtttgaactacgcaggtccactttatacatggatttttttcaaccaaacatggattgaaaatgtagtgttcatgggatgtgaaatccacccttaacagagggctgactttttaaatggtgtgggttccgcagcactgactgtgggacttcagtatgcacgggatattggcatacgtgggagtcttggaaccaatctccctgctataatgagagacaactgtggctaactcttgaatatctgctagtggattattcaatttgcatcatctctgaacaatttttaatcctggactggcttctactctgattttcaggttattacaaaaggcaaagaaaattctttttagtgttggtaggaataatattagtaaggtaaatccattagaggtaactaatgcgtgataatacatttgaagccaaatataaatggattttgaattgtctgcagttctgtccccctccattagtgcaaatgtaagtatttaagggctgaaaaaatgaagactagagggatcagagtgggttgtggcacatcattctatgatgatgtgtattcccacatgcctacgtggatacctagacacatgccttacctgttagctttgaatatttatatatccttttgggttgtataacgatttgaatctaggcatattactggattttgaactaattaacagatttatagagtacctatcatgtgtccaaccctatttttgtgcttataaggaagaaaatttcatggacctgcccaaaatgaaatggttctatttagccatagcttagtaacctgatcctggagtggggtatctttatatgtaatttacagtgtagtatgtatatctttggaggtggtggggagtgccagcctatgcacatatctttatcctatatgcaaacataagagttcaagtcatgggtaagggagggctgtaacccctctcctctgctttcttctagtgaccccagttttgcccgtctgggtcagatggtcttggagtatgaccaccctctgaagaagctgacagaagagtttgggcctcacacaaaggcaagttccctgacaatggagaattcctcaggcaaaagtatattgtcctcatgattgccgctaaggtttcatttgcttttccccacaggctgtgagtggagccctcctctctttgcatttcctctttgtccgaagaaaccagggggctgagcagtggcgcagtgcccaacttctaagcctcatcagcaaccccccagccatgattaaccctgctaattcagatacagtgagtgcccttttccttttgttagtggaagcattctctttgccaaggccatcatctctgtagagggtgcttctttcaggaaatatcagtactaaagaatgctttagtcttcttctagggtatgtctctaagttgagcacttcttgtagctaaaaaatcatggttggtttggggcttttgtttggatcagggttagtggtttaacaaaagtgatctataagcagttagcctgtccatagaaggaatttagtaaatattcatagaatgaatgaatggatgaaacagagtcattaggcacctattaagcctagcagcaacttgattttaggaatcaattaacttatttttatttttttgagacagtgtcttactctgtcacccaggctggagtacactggcatgatcactgcttactgcagcctccacctcctgggctcaagtgatcctcccacttcagcctcccgagtagctgggactacaggtgtgtgtgccaccatggttgactaattttgtttattttatttaattttaatttttatttttgagacagagtctcactctgtcgcccaggctggagggcagtggcgtgatcttggctcactgcaacctccccatcttggttcaagcaattcttctgcctcagcctcccaggtagctgcgactacaggcatgtgccgccacacctgggtaatttttttttttttttttgtatctttagtagagacagggtttcaccatgttggccaggctggtcttgaactcctgacctcaagtgatctgtgtgccttggcctcccaaagtgctgggattacaggcgtgagccaccgcgcccagcctgtttatttttttgtagagacgaggtatcactatgttgcccaggctggtcttgaactcctgggctcaagtgatcctcctgtcttggcctcccaaagtgctgggattacatgtgtgagccactgtgcctggccaggaatcaattaattaataaatgtttttgtttgatgactgtgggctcaaagtccttccctcaaagaacttatagtctggtagggaacatatgccatgtagtcacaaaaatacaactgatggtacatgattagtgataagtgccaaatgagtgatttacattttaagcagtaaaataatccaaaggattaaccatcacagggagaaatcatgagaagatttctgagtcttgctctcttcattttattgttattaaaaatatctgaactgttgaagagaagttatgtgaaaccttttgcttgttctgacttctagtccaagttcctctttattttctcaactgtattgtttttcccttactccacttccagtgcctcatcacctccattattggcaggcttccctgctgttggtttatcaatgtgccctaaactagtctggtaaaataaaagttagttttttaaaaaaatttagagacagggttttgctctgttgcctaggctggagtgcagtggtacaatcacagctcactgcagccttgacctcttgggttcaaaagatcctcctatctcctcctcctgagtacctaggactacaggtgcacaccgccatgtctggctaatttttaaattttttgtagagacaaggtcacactgtgttgcccaggctggtcttgaactcctggcctcaagctatcctcctgcccctgcctcctaaagtgttgggattaaaggcgttagccaccaccccttgccaaaagttagttttgatactcagatcctagtttgtcctttctcctttagaggaaggccaagttaaataactgatcatctttgcttctcttctcacagatggcctgtgagtatctgtctgtggaagtaatggagcgctggattatcagtaagtttagtgggattagatgggagtggatgaagcagtatgttatatgaagaacaagttctaaaagtcttcctctgcactgttttcccacctacagttgggtttcttctttgtcatgggtgcctcaactccaatagccagtgccagaagctgtggaagctgtgtctgcagggctccctctacatcacccttatccgtgaggatgtgctgcaggtgcacaaagtcaccgaggacctgtttagcagtttgaaagggtgagagacacgagagccaaactgatcttccttgaatagtttttagcccctccaatatcctttttcagtctccacaagtgttcccagatataggtggtaacgattaattctaactattgaagaaatatacattaaatacctactattagctaagtgcttcactgggttttagggacacaataatgaataagacaacatggaggttaagagcacagactctgaaactagattgcttgggtttgaattcaggctctaccactagttgtgtggccttgggcaagttgctcaaatttcccatgccattacctcaatttcctcatctataaaatgtggataatagtagtacctccctatggcctacctcatagggttgttgtgaagaataaaagtgttattatttgtaaagcaggtagaaaagttcctggtacattgtaagtgctatgtgcttgttaaagaaaaaaaaaagacagttactgctctcgaggaatctatgaactggtagaaaataaacaaattgtttgatagagtaagagattataatgtgtaaacacaaagtactgtggaagcatttagaaggacacttaaactggcctctcaggatctagaaaaacctggagacaggtagatctgaaaggctaaacagttgaagagtgtgtgtatgtgtgtgtgtgtgtgtgtgtgtgtgtatgtgtgagtaattgtgtgtgtgtgtgtgtgcctgtgcattgggtagaaaggtaggggagttgcttgaggcaaagaaagatattctaggcagagaaactatcaagatttttgaggcaacaaagagcatggcaagttctgagaagttcatgtagttcagtgcatgggcatctgggttataaaaatgaagatgttgaggatgaatttggagaggtaaattaggatgttgtatgctttgctatggagtttgaatccatcccaaagaggatggggaactattgagtgatttcagacaggggagtgacatgatcatatttgcattttagaaaagatcattctggctgcatggaagaaaagaaattagatgggcaaaactagaggcagagattaattaagtaaattagaaggaattgaggatgatgtcgaggtttctggcgtggatatctggtattccttaagataagagagcatgtgataaaagtaagtttgtgggagaaagattgcgtggttagttttaaacaggttgactttgaaatgtctgtgggacactgaagacagatgtgttaggccttctattttatggttctggaacttgggagtgaggtctggattcagataaagattgctgagttggtagttaaagccagaagagtagttgagattactcaggagcacatgtggagtgagaacagaatgggaaaatcctctgtgtatgttgatatttaagggccagagaaatcagtgggagatactgaaaagaagagggaaaagagaagccaacaaagaaagcattcctagaaggaaggaccagtgatctgttagacgatgttgggagatcaaataaaataagaattgaaaaaatgttcattggatttggctctaaagatggttttagtgcccttcttgtgaacaatttgagtggtgaagttgaaacctgggctgcagtgagtttaggagcaagtgagagatatggaatttaataaacagctctttcaaagtttgactgtaaagggaagaatagagagaggtaaaatgagaaggaggagtgggtttaaggaaagggtcaaaataccaattttttttctggttgcaaataaaacatccagaaatgtaaaaagtgcaaagtggaagttgactacactatcacctcccagaatagtttgatgtgcatccttcagatgtgtgtgtgtgtgtgtgtgtgtgtgtgtgtgtataaacacataaagatggcatgtattttcaaccttatgaaagtaatttttaaaaagcaatggagccacactctatattatgttctatggtttgcttaaaaaaacttactatgttttggatatctttgaatatcagtctatagagacttattatttttaacagttgaataatattacattatgtggttgtaacatagtttatttacaaaatcctctattgatggatatttaagctgtttccattttaaaaaatcattgtaaacaatgctgtaatgaacattcttaggcatatatctttgtgaatctgtgaatatttttttattttctttttttttttgagacttgagttttgcccttgttgcccaggctggagtgcaatggtgccatcttggttcactgtaacctccacctgccgggttcaagcgcttctcctgtttcagcctcccaagtagctgggattacaggcatgtacaaccacccccagctaattttttgtatttttagtagagacggggttttaccatgttggccaggctggtcgcaaactcctgatctcaggtgatccacccacctcggcctcccaaagtgctgggattacaggcgtgagccaccgcgcctggccttgaatctgtgaatatttctataggctaaattcttagaagtggaattgctgaagtaaagggtatgtacatttcaaattttaatagctcttaccaaattgtgctctaaccagttattatcaagagcctataagaatactgatttctcacactctcaacaactaagtattgtcattaaaaaccattgccagagttagaaagagtaaatctgagattaataattagaagttacaggaggtggatttgggcatatgcatgaaaaaactttctgatgattactgcttctaaggaatggaagagatgttcgaagggtgttcagttctccatcactaagagcagcaactaacttgtgtgatttatagtttagggagttctttgacataaatgatctaatttatcttcatgaaaattcaagaataagtattaatatctttttttataaatgagaaaatggaggctcagtctcagtgtcactcaataagaggtgaaattaggacacaattccaggtttctggactctgaatcttttctctttccattgtgctatgcagagattaaaataattatccaatagattgctgtgaagttgaatgttgatttaattaagatactttccaacaccaaacttctttgattttgtgctagttcaataaagtagtggtttggagaagggaaaggagaggtgatgaagtcccaataatgtggtggcaatagtgatacaggacaagagaaaacaaatgtaaggaacatagagagcaaagagtctaagataatgctgggattctgagcatgggtcactagtagaaaaaaagagatgtggttaggagaatcaaatattgcagaaaattaaaaacaatgaaaaggccttctaatttggtgattcaaaagttcacattgactttagagagagcagttgcttagtgctgaaggctttgtgggattcaagggtcagtgagaggtgaggaagtagagagagtataggtgtctctttagagaagtttggtggtgtgggaaaataagcagaattcggtggattgtcagggtcaagcaaggatcttcttagaatacgggaggctttgaacttatttgttgggagaagagaataagccagtggagaaggagagattaaagtattaaatagataactgatacagtgaaattctaaaaggaagttggtgggaatgggacccaaggtagagattgagtaactacttttacttgagagcagggcctgtgttgtatttatacactgctccctttaaccccctcaaacctggaagagtaccttgatttgaaggagtcaaggcaggagcacaggaagagaagtctagccccacctttgccattaaagccctatgtgaccttgacaagtcatttcccttccctaggtattattttctgtatctgtaaaattatgaggtagagttgaatgatctctaagctgtgagtcttttattaataggctagggtgagaagtagggtttggaaagatcctgcctgtgagggctgcccatgctcccaccagggtataggctggactctctgaggactgggaaggtgaggcaagggccctaatgggtagcatggtcaaccccattgtgcttgtgtcaatcctcaggtatggcaagagagtggcagacataaaggagagcaaggaacatgtaattgcaaacaggtaaagggtggtgaatgcactctctgagaggggatggaataggaatctcttctcacttttgttctcacctaagccatccttagtttctgtacagctttattgcctcaacccaagaacttgctgctaccccataaattcttttttcttttcttttcttttttttttttttgagacagagtctcgctctgttgcccacgctgggtgcaatggcatgatctcggctcactgcaacctccatctcctgggttcaagtgattctcctgcctcagccttctgagtagctgggattacaggcacccaccaccacgcccagctaatttttgtatttttagtagagacagggttttgccatgttggccatgctggtcttgaactcctgacctcaggtgatctgcccacctcggcctcccaacgtgctggaattacaggcaagagccaccactcctggcccttttttcttttttaaaccaagtctaacttgagcattgaaccttccttctgcctgatatcccttcctaaatatagctttcttctgtgctgcctgtggagggtttttaagggtgggagaggtgatagtcatgttccccttttcttccttagtggccagtttcattgtcaacggcggcaatttctgcggatggcagtgaaggagctggagactgtgttggctgatgaaccgggactactgggtcctaaggcaagaggaagaaatgttgggaggggaatgatggccagtgataagagactgtgtagctacgtggcactcacgagattttgcctttctgagtcttttgtcattcatttgtatgtatatatgcgattcccttgaacattcttggagtatcccaaaaccttttgtatctctttttttggcactatacgtagtatgtggtgtattaagattacttttatacatgtcttatcctctatttgagtgtgaatgaattggagacagagcttgtttttttgtttcaaaccacataaatgcccagtaaatatttctaaaactttatttgatagggagagaagggtactaattgtgagccagtgtcaacatgtgtacctgcctgattgtgtgttctgtagttgaggttttttggtgagtctgaatgtttattattcacactgttgtggctacacaattacatccatacctatattatcatggtagtttactctgtgctttgaaatccatttttaaagttgaaaattctaatagtctctaccccctccataggctctttttgctttcatggccctgtccttcattcgtgatgaggtcacctggctggttcgccacacagagaatgtcaccaagacaaagacacctgaggactatgctgactcgttagtacttgacatggctaagaaccttgtccttagatggactggggacagggaggcatcagatgaccttaggaggtctcaatttctgccctgatatcactgtgtttgtctcagttcatatttctagtcttattcatctctgttctcatcctaaactttataggagcattgcagagctacttttcttgttggaggggattaggtctctggtccgaagacacatcaaagtgatacagcaataccaccttcagtacttggcaagatttgatgctcttgtgctcagtgacatcattcaggtatgatatttaattgattatactttggaaatttcaggatgatccctagtgattttcctattgaaaccactctggctgaatctcatgctctgtaagttgggtgtcaaaaggtccaatctaggctgggcgcggtggctcacgtctgtaatccaagcactttgggaggcctaggcgggcagatcacgaggtcaggagatcgagaccatcctggctaacatggtgaaaccccgtctctactaaaaatgcaaaaaaaattagccgggcatggtggtgggcacctgtagtcccagctactcaggaggctgaggcaggagaacggcgtgaacccgagaggcagagcttgcagtgagccgagatcgcgccactgcactccagcttgggcgacagagcgagactctgtctcaaaaaaaaaaaggtccaatctgccccttcatatttgttaaaagaaaaagaaaggactaataatctcagccgtctttttttccccactaagtgaaattacatagaaataggagagaaaaataaagagaaactggatgttagaatggcagggaacccggaaagtttccttcatctcttgcttggctttttctctctgtttttaacacttagcaattctttctaccttcatacgctgactgagcctcatggtcctagtttctgtcctagggaacctgtgcccacttgacagtaactgcagctccttttttagaacttgtctgtgtgtccagaggaggagtccatcatcatgtcctcattcgtcagtatcctctcctctctgaatctcaaacaaggtaactggagggaggtgggggaggcaggacatatgtgaggatgaacatcttttatccggaaatattgatctttgagccaggaagtaggacaagatgtttttgaagaggatctaccattctatgtagttggatattggtgtgctgtttattgtttccttttatacttccgtttttcttgcagttgataatggagaaaaatttgaattctcaggattgaggctggactggttccgcctacaggtaatgatctgttcctgttaaagattctcatcctcagattcttcctcccccacaatcccttctctttttatctcctaaatttgctttatggagtgagtcaactttgaaaactgctaattggacaagacatactcaggccaaactgtaattccaaggctgggggcctttttcattcatcttatttttctccacactttcccaactccaaccgcaggcatacactagcgtggctaaggcccctctgcacctgcatgagaaccctgacttagccaaggtgatgaacctcattgtcttccactcccgaatgctggactccgtagaaaaattgctggtggaaacttctgatctgtctactttctggtatgtcttggttcagagctctctttaaaaagttttattgtttccttttttcatttttttctccattatgccacttacttcaaagaattttgtttaatttttttttttttttttttttaaagagacagatctcactatgttgcccaggctggtcttgaactcctggcctcaagcaatccccctacctcagcctcctaagtagctgggattacaggcgagagccaccaagctctgaaccagagctcttcatcaattcatttgctctcttgcctggcctctgcggaggactgtcattcccctagacaattggaaagtgttgctgtttttgagatctccttaaggtgctcaaactccgcagctcacttgtgtcagctttttaccaataatcttaagtgataggaatttgaagttgattccttttgttctgtattctcttttgttcttttgtggaaagccatttggattttacatagtcttcgcttctctggggtagttagcccatatgtctagtttcaatctcctctctttggaaacgtcttcagattttttttttttttttttactctaggaacattgtgatttaaaagaaacaggaaaaactttgagttttagtggacaggagtgaaaataagtgagaggcctagagaatagggactttggagaatgagctgaatgagtttgtctttcttagatagcacttgacgtttttaggtgaccactgttgtacataattccaccctttgaaggatcaaacaaggagtatgtagcttactcattcattcaacaaaacacaatgtgttgtctctgccttctgtaagcaatgtagttggggagatataatacctatatgtgaaaaggacatcaacatagtacttgcaaatgtaagaaagtgtaaaagagtacatgaagttgagaggacatgggttgaggaaagatcagtctcatgggattaatttgagaagattttctggagcctgagtgttaaattttgagaagaatgtgaattaacactactgaaggacttctaaattagggggaatggcccaaatcatgccaaggttctaagggaagaatagcaaattttgtgcaaggaaagggaagaagattatcattaaacttgcctggggtcctttataaaagtctggaaggattaagtttcttgggttccgttctatcttaagggttacagaaattaaggagagagtggtaaatatcggtaaatgttttttgaaagaatgaatatcctctccgcctcaaagggactagctcttaaactctatttttcttttcctttatttttcactcaccactttactaataaggactaaatcttgatttaaagtcttcccgtttctctgcagctttcatcttcgtatctttgagaagatgtttgccatgaccttggaggaatctgccatgttgcgttatgccattgctttccccctgatttgtgctcactttgtccactgcactcatgagatgtgcccagaggaggtaggtatcctgatctccagaccctgtcatctttctagtcatcatccttatcacccaaaacacaattccaagggttgattttggtcccagaaagggtataaacatagatgtatgatatgagtccctaaatatctcagcttgatgtatcctgtctctgggcctcagtttcttcttctgtaggaatgggtaggaatcttctgtaagattcaggcaagggatgagagcagtattgtgaggaagaagtggccgtgctggtgatgacagtctcttctttggtccctctttcccatagtacccccacctcaagaaccatggtcttcaccactgcaactccttcctggaagagttggccaagcagaccagcaattgcgtcctggagatctgtgctgagcagcgaaacctgagcgagcaggtagactcagccctctctgtttcactctcccctctgccagcgctcagtgccttcccctctatctaactttgtttccctctcagatgccaagctcagtaactctttctctgaagtagggctagggcctttctgtacttgagtttatggcagaattcttttcttagtgtagtcccttcagtctttcctcccttaggactggatagaagtgtctaaaaatactcttatttgaacagctgcactccaacaaaatctgtgctctcacttgaagagttctgagagatgagttaactttctaatttacccctcctctctttgccctgcgtacacatactaaggacagtggcccccaggtcacctgtcttatctcatctttctgtctatctgcatcttaatctgtggctctctggacattttgaagcacctcttctgtgtttatcctcaaggctgctttcttgcctttttcttcttatttttcccctctcctcccttgactgactcttagcacctcgtcataattagttcaacctaaatttcagaaaatttgaaaatgagaaacttgttttgctgttgccctggagtcttctgggttttccagactacccacctttcctgggtttgagtcaggcttggtaaaggggagtgtgtgtatgtgtgtgtgtgtgtgtgtgtgtgtgtgtatacagatgcacagttacattattacttaacctttttatttttcatatgcaaattacatacaatggggataaaaatagtttctttacagaagtgtcttaaggattaaatagggtatatttaatatttgacataaagcactcaataaatgttacctgctatattagttggtacttaccgggcacaaagccctgtgctgggtttttggggacccagaaggaaggtacacaattcctgcccttggggaatgtcccagtttaagagaaaagggagtataaatacatgtttgaaagaaatttaaataattaatgcaagaagatatgcaaatgagtacaattgcaggtatattcattactcaatatgcttaatctcagccaaaaggctgagaaagccaagaagagatcatcagtcaatatgaataactactacttgcaagaacactggtaaagagatttgctctgtgctgtcgtctcagggatgactaaaacatgatgcgaataattttcacacatacagaactttcgcaaccaaatgagtataggctttctaaagttaacattctgagtaaataattactggcattgccattactagtggaattacatattttggaactgctttcagaatctgctacagacacataatcttttgcacaatctcagggttgacacatctttttccatcaaggtggacttgatttttttgaaacagccaagagtttggatttaaaaaaagaaggcacgactaaaagtaacaaaactggtttccttgtgtgggtcttatgctgctctcagagtgatttcaactgaggagcttccagacatgccctgctcatgctcagcagctctggagtaaatggagagaattccagtcaccctgaaggagatgtctgactaggatgtctgagtgaagacaagagatgccaggttgatgtttaagctaattagcaagaaatatgctacttaaaaaaaaagtggaaagacaatgctggccacattgtgaactccaaatctttggagggctgtggtgatgtgggtaactgtctcatgagatagaataggaagggatgtagtatgtgagatgattgtcccatctagcaaaaaataactgttttcctacattggaagaccctgcaaagcacaactgagtgggacttttagatcttgttctttatacttgagtttttccattaagaaaggttctctcaggatgtgggtgtgggagtgaggctctgatcccagaaagacactgccatcttgagacttagagcctgtacacacagagatatttatgaaaactgaaagaggtgagcacattctgaataggcccccattaaagaaagaggtgtgtggaaggaaagagagaggaaggcagaaagataaaataacagacaacaatggacaacaacctttttataactgtcaggtgccgttttagcaacaaatcccctttctccatttacctgtgtttgtttctgaagcttctacctaagcactgtgccactacaatcagcaaagccaagaacaagaaaaccaggaagcagaggcagactcccagaaaaggagagcccgagagggacaagccaggagctgagagtcaccggaagaaccgcagcattgtcaccaagtgaggacctgggccctagatggccagctgggtactgcatcaaagaaggcaggaaaggaaagagggaaggtgacacagaaagaaaagagcgcaagtcatggtggggaatgaggggcatggaaaagcacttaaatgcgaatttcctactttgcctttgaagtctacatcaatgtgtactcttctaggctgagtatccctagaaactgggtcatgggcccaacacgtccttcctagacattagcaggcagtgccagacctgtaatccaggctcattttcctttctagcatggacaagctacacctaaacttgacagaactggcactgacaatgaatcatgtatacagtttctccgtgtttgaacatactatcttcccttctgagtacctcagcagccacctggaggccagactcaacaggtatcactctttccttgtcctctgtttggacagtagtcttcataccctaccatatacctctatgtgtagtatggtggtcctcaaagttgggtcccattacattcatcctggtggtcatgccacacggtggagattctgttgcagtcagtctagcataggtcccaagcatctctattaaaagcaaacaaaaggaaccccaaacctctataggtggttttgatgaacaccctaaattgaaaccactggtttagtagaatgagcaaggcctttgcagtgagcagacctgtgttgacaacctggtcattagctaagacattggagcagatcgtccaacttatttgaaccagtttctttccttgtaaagtaaggataatggtatttaccttatttatggataattgagaattacccataattgagagttggtagagaattaaagttagtaatgagtgcaaagctcctgacatatgttaggctttaataaaatacatccctagcttccactttgcgcttcactccattgccccataaagtaagatgcacattggaattgggcactacagtctgcaagtgggtgaatgggaggaagaattattatgaataagtctcagcacttctgtgttttcttttggagtatgtagcttattcattcattcaacaaatgtttattgaacacctgctgtgtgtcaggagtattctaaaagctgtttatacagcaatatacgaaacaaataaaaacctctgcctccatgcttacttctagtggggaagatagataaacaaaataagaaagcagaatacgtagtagattagatagtgataaggaccaagcagaaaaataaagtgggaaagggagataggaggatgtgcggtgctggtggtgctggtggtggcagaagtaggtgttgcagttttagatggagtgtccaggaaaggcctctttgagaaagtaacaattgagtaaacctgtgaggacactgagaaagccacgcatgtaactactggggaaagagcattctaggtagaggaaacagcaagtgcaaaggctctgaggttcgaacatgccttctaggttcaagggacatggagaaagacagtgtgtctgcagcactatgagcctgggagagactggtaggatgtaaggtgagggaggtcagaaaagtggcagattgtgtatgcgcttatatgtcattgtaaggacttcggcttttattctgagtgagatgggagatggggagccttggcaggttttgtgcaaagctgcaatgattagacttgactcaatattttactctggctacattagcgggggcaaggacagaagcagggaaaccagttatgaatctatgttttgattgtcagagaagcaaatttatttttcaattgaggtttttgcttgggtgaagttaaattagtttgttttcattacatacacgttaactataaggaagaaagtgtctcagttgcatacacaatgtcaggaagatgacagtttgataatggcccatgtgcaagccttcagatgctggtggtggtttccaggccctggagcagcatgagtgtgacattcaagttttacccgaataatctctgatacttgcttcactgacatcattgttcccaaagccctaaggttggcctagaggtttggcctcagtgttaactctaaattagatcagtcttgcccttagtctgtcccttctgtattatcttcccttaagtggtacttgagaaccttttccctttcatttgtggagcagaccagccccacctttcccatcccctcccctgccataagcattttgccaaaaaacacaaaacaaacaaaaaactacctctttcctctgtggtttacattttaacaaggaaaaaagtccttagtcagaggactgactctaattgtgaaatctcagatacttgggggaggtattttgaaaggagttgggggtccagtggtgaggggtcttgctggtgtgcccctacaataatatagtgtggatagttattctcccctctctaatgttgcctatagctgcatgccagccacgcatgatctctattcagccctggcgtgccatggctactcaggattataatatacttccaaggatttctaagcatggttttccatttctggcagtgatcggaactaattcttttcaaggggaaaagataaatactttcactgggaatgcagagggtgtgaactgtcaggtagagttagatggaattagagagcccaggtcttctactacctgagctatttctccagaggaggaagaaaagcacagtaattagggatcaaatgttactggaatcaagtcccagctctgccactgccagctgtgtggtcgtcagcaatgatttattatctctgtgtctcagtttcctcatctataaaaatgaggataataactgtctctagcttattaggttactatgaggtttacatgagataatatgtgtagtaaaatcctagcacagcacctggaacacaatatacactcaacaattgttactgtatttgccattatgattgtaattctaattttttttttttaaatcacctagagccattgtgtggctggctggctacaatgccacgacccaggagatcgtacggccttctgagctgttggcaggagtcaaagcatacattggtttcatacagtcactggcccagtttttgggtgcagatgcttccagagtcatccgcaacgccctcctgcagcagacacaaccactggattcctgtggggaacagacaatcaccacactctacacaaactggtcagtgttgcttaggcttttccactgccttactttgtgttggcactttttcctttacacggtaggacctcagggcccgagcattttagctcccagggtcatagactccaaaatggagggttgcttctccttgaggaatggagcaataacctgagacaagcccagatccccttctgtccaccacgaagtttccttctcaccctcactggaacatccttcagcctaccctgcagttatttgaccttttctctctaatatctagttcttaacctttcttttttggattcttactgtttcaatttcaaatgatctctcttcctctttccaaagttctcttatttctctttttgcccttacttctccttctgaaaaccatctgcctactaccatctctctggaacgtctccttgtccccagatgtgactattgttcttaatagagaagggagcctcctccctgcaactggagaaggtgggaatcagcactgtttcctttgacatgttaaggaatggaaaggagctggatttctacctccccaagccactgggtggcgctcttaacccaaaatcagctcagtaggcgacaggctgcaaagaagaaccccccagaacaaggggaaacaaagtttgcaaatgcaaatgccagttggggccaggcaggaaaggtaaatggatgtgccacatgggccaggcagagactttgaggaggtggtgagagaatacccctctaaagggaacagccaccgcttagctccacctgattgctgccctactaaatccttatattttatgtaaaaatctgtttcaaaattttgacaaagaattttccataggtgccagagaaggtgattcagcccctcttcccctgtcagccgtttcagcgtaaattcaaaggaaaaaaaaagtttgactgggtttggcccactgacagttagcttgtgatgtctattagatacagacccagagcaagtgcctgggagaggcgggttggtcaagccctcctctacccacattggctgtagcccagctcctttaagtttgcccagaggtcaggaggaaatatttggagactgatgacctgtgctcacaggtacctctttgcccaggaggtttgagagtatatttcaaaggagtctaattaagtagtgacttttttcttgccaggttgagcctgtcttacctgacagagggtaagggtgaggggaatacagctgttggaaaagagcagtggttgagggaggggagtgcatgctattgcatttgacggtatagcaaaataccctccaggttagaggcaaagtggaattccagtactgccagttgtttttgatccatcagcttggggtgttaattagaacattgtgccatcttctttgagtttcttctccctaccccagtcttttgcagagtttttctttctgagctcagtggtagtagtagggaatgctggtagggagaagggattggatcctaatctatgttttcttggccaaccctgtaggtacctggaaagtctgcttagacaggcaagcagtgggaccatcatcctctccccagccatgcaggccttcgtcagcctgcccagagaaggggagcagaacttcagtgcagaggagttctctgacatctctggtgagctcagggcctggtcttcttgtcaaggagctgagcccttccttcaatgcacagagaataaaagactaggacatgtatttaggttggtgcaaaagtaatttttgcaattacttttcattgcaaaaaccacagttacttttgcaccaacctaatagtgaagggtaagggataaagtataaggaggacattctcctgtttggaattattaaatagtggtctgctgtcatggcatcttcttcttcttcttcttcttttttttttttgagatggagtctcgctctgttgcccagggtggagtgcagcggcactatcttggctcaccgcaacctgcgcctcccgggttcaagcaattctcctgcctcagcctcccgaatagctgggactacaggcaaatgccaccatgctggactaattttttatatatatatatatttttagtagagatggggtttcaccatgttagccaggatggtctcgatctcctgaccttgtgatctgcccgcctcagccttccaaagcgctgggattacaggcatgagccaccacccccagccagcgtcttatgctttagggatacattttagagtcttagccagtgtttggattgctgatgtttaataataacgatgatgagatgatacatgacatttattgtgggctaagttctaagtgtttatacatattaactcacttaatcctcataacagccttggggtataatagatacacttattcccgtttttcagatgaggacactgggacacagagagtttaaggaacttgcctaagtccacacattcataaatagtaggacttggagttcgactccaggcagtcaaactccaggaactgggggcttaagcactgtacagcgctgccttccagtgtctagaagtgcttttgtgtctcagggggagacaggtaaggagtgtgtagtgaatgagatgggaagcctttccctttctcaagagggtttgaaactacaagatcctttttaataggtttgtttttaccaactaattcatgaactatcctacttctttctccttcctctcacctccatataaatcagggacgctgcatagtatctgggacagggtgaagatgttccagtgacgctgtcctctccagtcttcttctttggggggtgctaagaaagccaaagtacacagttctgttttccagttctgcctccttcccatcatcccgcctccatcagtaagctgaccctacgctttacctgctgcaggtttcagatgtccccttctcatcaactctacccacaaactgtaggcagcctctaaaatcagctttaggtcttgctgacaaatgacaagcagcaggaggtaatgctgattcccccttctaccacccccaccccaatttcccttggttgccatagtgatggggcaatgctactgcaaaaatagatagatggaaagagaaggatgccctagggttgctagctgggggtagagaagactggagtaaggagctttggcagatccaaactggtagatcagtgtgtctcctttctgtcagctacagagggcgattcagctcttcttcctctctgtcagccattgcggcattatccaagttgatcggtcaggaaatcctttcatagttctgagctcagttcttcctattaaaacaggttgactctaaaaatgtctaacatctactgtggacaagactctgtgtcagtggctgtgaccagttccatttcctctgtcactgatgaaggtggagatcactggtcctgctttgaaagacttgagtgtggagccttgacttccatttctctctgaactcttattagcgatattaaacttgcctttcttctactggtctcttgttgttgttacttctggtctttcatggttttccctgctgggatggcccacagccagagatcatagctagagctccttcctatctggatttgtcactagtgtttctgacatgggatttccccaggcaggctttatttaattcacaaagggccagagcaggctgggtggcaagggataaagcactgggactactagagaaaagaaggatttagaggaataaagaactgagactctgcgggatgtgtgttgattatgaaaaaagaaaaggtagctcaaggagaggaaaatttggacagtgggacactaagtaagggaagtaaagggaaaaacatacaataaacatcagatcttagatgaggaaatagttgtatctgctgggatgcagtaaggggcagtaagacattgcactaggcttccagtaccagcccctgctgtggttaagtggctccggacaagcacttaacccccttgcctgtaaaaccacgatgatccttcctatgccacataattcagaggactcataacatcatcataatactcctttatccatatattttccaaagtttttataatgtatcttatttactctcacatcaattctgtgggttgttcatggcagatattcatatcctcattttacagagaagtaaaccaggctcagagaggttcaatgacttaaggtcttacgtctaataaaactagtatagctagtacagcaagagtcaaacccaagtgtcatataaaggaacacgggaaagtatagattcttataggaaagtaaagtaattagttatcatttgtggtaagtcttggtgtgagtaccagtggagagagggtaaatgtcccatggacttgccagacttgtcacttgaatgtaggattttaggctatttttgctccttgacttctcattttcttttcttgctggaaaacattttaaatattcaaattaccctatagctgttgtacaaatactccagtgccttctgagtcccatctggggcctctgtaactctgttccagagatgcgggccttggcagaactcctgggcccctatggcatgaagttcctgagtgaaaacctgatgtggcatgtgacctctcagattgtggagctgaaggtactatggaaacaatcccttggggaaaagatcctaccttgaggaaagagggtgggtataggagactgggggggaagatgtaacattggtctcttcttttcctgcttaatgtctctgtgttcctggactacagaagctggtggtggaaaacatggacatacttgttcagatcagatccaactttagcaagccggacttgatggcttccctgctgccccagctgacaggtaagcatcctcttcccctatagtgagaaggagctgtggaatcacattgcagatgacagggttttcaggaatctggaggctaggcggggtctgtagaatcaaaatcatcaccaatccctctctaaattatcttttctaacacgcttctttctcctcaggggctgaaaatgtgctaaagcgcatgaccatcattggggttatcctcagtttcagggccatggcccaagagggacttcgggaggtgagttggtggggaggggtctgtcacagagtcacagatacctctgtgggtagggtttgtatgataatttgtggaagtattgcgggaatcagttttaacttctgcttcagaaggggttggtgagcattgagaagagggagagtaatttggcagagatcctagaagatccctaggaataaatgagcttaggaaacctagaggcataaggagagggatggcttggaaagctggctaggttcttatctaaattgagtgcccctcctttttttttttttttatttctacctatttttgaaggcattggtcatggtcttgtggactcatttatcttctctttcctccaggttttctcctcccactgcccatttcttatgggtcccattgagtgcttgaaggagtttgtcactccagacacagacatcaaggtatggaggagtgcaaagtagaatctaattaggagacttttgttgttgaaaaggaggtagctaggatcttgtaagggagagcgggttctgaagaacaccatagggataagggcgagggtttgaataggaaaactggtcagatgaatattcttggagagaaagagcagagctggcaagatgtagggggatggagagaagtgggaggctgggagacactatgagggttggggagacattactggagggggaggggtaagacctaggatagtatctgtaggttttcacctgatatgagcactgtgcaaattagataaactatgtgcaaacaagtccgctctttagtcttgaggttaggtactgtttataggaagatttgttcctttcattcccacccaccctgcctgccctcagtcttttcttttcctggccttttcttcctcccatccttaagctttctggttcctctatgtctgtttcacctgcctcagacccccatttactacaggagatggtgagaggaagaagggcttccacagacaatataagttaagcatccatttcccacccatctcccacctttgagtcatcttgtcttttgaatcatctggaactaagaagtatgctatggcaggaaatacagctagagcctaggaatagaatccttcaaatgcatagggcaggctccttctcttataattgattcctttaatggagagtggtctgtgttaagaggaaactagttagcaggaagaattaaagttatgtgttaagaaaatcttcattactttgagatcaaaagagttgtgaaatttccacctctatctgcctaaaatcatgaggggcaagtgactgtgggggcagtgagggggcagtgtttcactaggatagctgcccctcttgaaagatctttgattttaagctgagcctgggtttctggcacctgctgatgttggtccaaatgctctaggctgtcaggagcttgtctagctgatatctcctgggtagctccaatctttaggctctgcctgcctgtgaaaataagcaggtaggggcagagagggaggatggcctgtccatcagagatgctgttactgcctcagaggagcaagaagattagaagaagaaaagataaaatcccttcaaccatccctttcttcctccagaaaacctcatgaaccaggttccttatctctgaggccgtggttccacaaacggtcatttaggtagtaggggatttaaataagggcagaacagaaggtggcaaagatttggcttctgtatcagtaccacagcaaagtgtgtgtatgttggtatgtctgtgggattctttttttttttcttgagacagagtctcgctgtgttgcccagtgctggagtgcgatctcagctcactgcaacctctacctcctggattcaggcaattctcatgcatcagccccccgagttcctcctggaacttcaggttcatgccaccacacctggctaatttttgtatttttagtaaagacagggtttcaccaggttggccaggcttgtctccaactcctggactcaagtgatccgcccaccttggcctcccaaagtgctgggattacaggcatgagccattgctctggccagtctgtgggattacttgcataagatacttagttgtccagtattaaaacaattatccttgttctttcaaaaaacatttttttaaatctaaaaaggggtctaggtacttagtatgggagtaggggcttggggctgtgtcctgggaacctgattgtaagtacaatgagacattcaggtatcaatcaatcaatatttattgaatgccttctatgtgctcagcattatgttaaacactagagaaggtaaagagaaatgcaaaactcctgactttaagataaaggaagaggatgtaaaggcatcacattttctctgttagtcactagggtcgatgtgtggtctaatttaatcttcacaacaactatgtgaggtaaatgttattatgccagttttataggtgggaaaatgagggatcaaagaggttaagtaacttttagtcaaggtcacacacttaataagtggtgttgctaggacttgaacccagatctgtctcactccaaagctttttgctcccttcactatgccatgaggttttaaaaagctatctatttggcaagataaggagatgagtcttgcattccatctaaaaagataactaacaccagatgctgtgtgtgatcaatgctaagtcagtggtaccaacgtaaggagggaagagctggctttgggctgaagtaatcaggtagcgctttacagagaagatgagatctaagggatggacgtaacagatataaatagaggagagaaaaggaccctcaaaagagggaagcacctgaaccagagtatgagagaggaagttgtagtttggggacagtgaataaattatcctggcagcaccgaataaaggaagtatttaggaaaatgaagttgaaaaagtaaatttgtacgatggagtgtcccaaagggttattttccctgtaggatagggagagctatgaagggaatatatagagaagatgacaataaaccagaagtttaaaatctacgattagctggacactgtggctcatgcctgtaatcccagcactttgggaggctgaggtaggaggatttcttgagcccaggagtttgaaaccagcctggacaaaatagcgagactctctctttctctacatatatataaaagcatctttaaaaaaaaaattaaacctgtgatccaaaagtcctggctatgcattccttctgtcaagccattgtgtcctgcgaatcctctctagaatgttattttcttctctccaggtgaccttgagtatctttgagctggcatctgctgcaggtgtgggctgtgacattgacccagccttggtggctgccattgctaatctgaaagctggtaagattggggaaagggggcgagatttgggaaaggagggcttgggccttattttgggtgaaaaaatgtcaatgtcaaagaagcctttatttgagattatatattcagaggatataagctgggagtgaaggaaggaccctaaccttcagaaaatacttacataggcgatttagatttatcctcaggtttcaactagttgatctacatcctcaggttccaactagttgatctaccggtcagctaaaaagtactaagtgagagtctgtttggtgctctgcaagtgctcaaagccatttacaatctggttgggaaaataaattaatgcaaatgaaacaatgagagaacaatacaaaatagtgggttgtgtggtatagcacccaaactccccatagtgattttgtgctttctccctccacataatcaccttgacactgtttatttcttcccatctcacacttaacacttttattttccattacacatttcctctgatttcagtcatacctatacacactcagaacaggatgaaccaaggggctaggattaaggcctttcaaaatggccagacttacccttcttcttctctcatggtgggtgagaaccttttgtcttctttctgcctctccatcctatcaggcagtggacaggcatcctagggttgcattgtacatcagcagagcccttggctgaaagttctgccctgttgccagggaggcctccaggactcaggcccttcactataggtggatgctagtcctgtttcttcaggaaaattaagtaataacttgcccataggctttataaagtgttttcatggatattttctcctgcgatcctcacagcaattctgtgaagtaggacccctgtaacagataacttctgtttgctgactttattcacttttcctcttttcctttttccctctcaccagatacttcatctcctgaggaggaatataaggtggcctgcctgctcttgatctttctggcagtttccctcccactccttgccactgacccttcttccttttatagcattgagaaggatggtaagtaaggggtaggtttgagacaccagtgctattcaagttagtgtcctggggtagagagaggagacagagatactggaaaatatagacttctgacttgggtgtaaagttctgtttcaaaaagcacttgaaggctggacaccgtggctcatgcctgtaatcctagcactttgggaggccaaggtgaggtgggtagatcacttgagcccatgagttccagaccagcctaggcaacgtggtgaaaccctgtttctacaaaaataaataaactagctgggcagggtggcctgtagtcccagctacctgggaggctgaggtaggaggatggcttgagcccaaggggtcaaggttgtagtgagccatgattgcgccactgcactccagcatagtgacagagcaagaccctgtctttaaaaaaagaaaaaaaaaagaaaagaaaaggaacaaaacaccaaaacaccccctaccctgaaaaaaaaaaaaaccagaatgagagaatgaactatgcataattcgatttcaataagatttcataggaatatcctgcctctaatctcaaaatgccttctcatccttttggtgtcaaatactggtggctcagcctgaaaacatgagaaattactagtttgggtcatcctggagtggcttactttgtcatttcctcttttttctctccatctatatcaataataacctaggttacaacaacaatattcattgcttgaccaaagccatcatccaggtgtctgctgccctcttcacgctctacaacaagaacattgaaactcacctcaaggaatttctggtggtgagtgggtctaggttataaagaatggaagattgcaaagggctggaattggtttgacttaaatctgtagacaattatcgttgaacaggcttttgagtctaacttcccacctaattcattcagtaaagagtgagaagctactatgtgaaaggcaagagtttcttctaaatttcctaacagctggtgtttcagcctctgcttgaatatttggaaagatcattggacaaagagtcagaaaatctgagttctgatttttgatctgccattaagtagttgtgtgacctctgaagtgccaagattttggggccacggtattttcatatataaaacagtgagattaaactgaacccatgaattcagattaaaccgaatccatgaaccttggtatgcatcagaatatcttggggagcttgttaaaatacagattcctgatctttacaccagacctactgagttagaatattgtagggtaaatctaggcctctgtgtttttaataaggcctctgggagatcagatgcacattcaagttgtagagacactgagttttatcatctctaaggccctttctaactctgtatggacaaatgatcaatgactacttctcaaactttaatgtaaatcagaatcacctggagagtttctaccttagtagattagggtggggctgaataatgtgcatttctgttcccaggtaatcttgatgctgcttgtctgggaatctcactagaaccaatggtctagatttctagggactggaacttaaaactaggcagcggattccactgtaggtcatatccaatttcttaaaaaaaatgttaaaaattttagccaaaatttgacttcctgtaactctcaccatggatcttaattttgcctctgggaaaactcagaacaaatacaataggccctagaattttccattctaaatcctccatggaggaattttgttcatatacttctgatacatggtccattcccctctgcctgcttgagcattctcagtaacaaagagcttatttctttgcaaagtatggtcccgatataagaaccagggcctcatctgtctccttccaggaggaaacacagcggatcatattgttctctcaggaattataccctcattctgagaagtacatgtcagggatcataagattggttggtgtgtctctatttaagctgaggcacccaaccagatagacctggctctcagcatcttaaatgcaaagaggattcacaccagatctctgagaaggggtgagaagggaatcccccacccttgccttcccttttatcctctgtttgctaaatgcaggtcacctgggcctgggatacaatgaatcatgtttcttctttgatcctttgggggtttggggatgatggagatgacagccatttgggaattgactggagaataccacgagcaagagctgtgtctgaatcagaggctcactgcctctagtcagatagggagtcagccataaacagcctgatgacagtggtgtctggaggctgcctaggaaaagagaggttaatctcctggcatacatcacctgcctttgctctaggtcgtttccctgccccttgcaatctctcccctagcactcctggcaacctgttgtctgcactgggaggtcagtgagatccaggctggcttataggcaacatgtatctctgaaacctaggagatttgccactttcccaccctgagtcttcaggaacattctagcacttcttaactctctccttgatcttttcttaacttcctgcagcctgaggccatttgatactgacctgtataaaaatctgctttacaaattcttcccttacaggtggcctctgtcagcctcttgcagctgggccaggagactgacaagcttaaaaccagaaatcgagaatccatttctctgctcatgcgcttggtaagtaccttatttaaattggtgtgagaatagggaatggaagggccagagggagacttctgtttagggtctttgcatccttgccattcttgtcacccaaaagcattaactaaggacttaactctgcataaccctctgaatgtagtcctcacattctgattaacattctaaacttgtcctataatcccagagtagagtcttcaaggacttctgcaagacagggccttcctggcccctaagctggctgggcccatgtcctgcaatgttcccgagtctgatctgatagggcagctgtgcccgttattggtaattacctgtccagtacatgtttggtttcacttgacaattttctaccactgcatttcttgtttttaagagtactatgaaaagagtgctggataacacagagctgaactcagaggttgaggggtgggggctcagaggagggaaaggattttagctaaaaagctctaaggcagggagcctggtgggccatgaatcaggcagctcctgctgtctcttctccttgcttcccaagctgtgggcttctctctactctggcagaaagttttgggaactctgactcagttaactttaaaagtttttttcctcatggccctgtttccctcttcaacactcttactcactcttttgctctgattctccatgttagtaatgcacttaggtatggacaggaagggcttttgccctgggcccagtgtttaaaaggccctccttgagccttcctctagtagagtgttctggggccctcctctggccaatgggaagaggtagagcctgtaccccaccttgaggcccatacgagagatatctggggccccagaatattttgctaagtagcttcagcccacttgtagggcctgtgttaaacttcttcctactgaggcggaccgtcctactggtggatatacctctagtgcccaagggacgtgtggctggagtttagatatgcagataaggaagtctacaagtgcacacaaaatccctctaactgagggtgggaggagaagggggactgggctggaagcttgtttcttcccttcaccctgttctggtgcagaacttggaggagcccaaaaattcttaattcaaacctgggcttccataagactacaaatgtacattgtgaaggttgaaagctagaatatactagtttgttagcttgatttaattagtcatgtggtatgtggacctccatctgtattcttgtccgaggcccagaaatgctaggggccagggattcctgggattccctccaggtctccttcttgaaatacacaggcactgagtgatatttatgccttagtttctccaactagaaaaaggcctaggctgggctggttaaggattatgagagagaggagaatggacttgggggtggatgtatttgtgtgggatgtgtttggtgaggcaagagggcagaggaggtagatgaggggagagtgagggcagtgcccatggtggtgggctatgtgggggcacaatacatagagcagcagcatggccttggcaaggcaatgaactcttctgagacttcggctctctatccataaaagtgggtaataatccttatgatagagtggttagaatccgtaaggtattatgcgtgaaagtgcctagtacatagtagatgctcagcaaatgttagttcctgctgtctgcagctcattttaggttctggattactttggcatgactcttcacttcctcaggtagttttcacccctgtcaggttggaggtgattctgtattacccacctgtattcttacctccttctgcttagaccccttccaacaccccaaaatgtggaaagtgtttgcccctgtggccttccaatgaagccaacagagtgacgggaacagagctaggatcaggtactttttgttggagggagaaactagagggactagttgctgtgaagcaatttaaatgcaaatgtttccacagagaaattggaaatgaccgaaggtgaaggagctgtattctgagttaagaggctactcatgtagcctcaaattctgaccagcacttctgtccccagagtctttctgttttggctgtcaagcctgggccatgcctgcacctcagtgttgccagtctgttcctggcacaggtttcctggggaaagacatggctcttatagaatcatggaatcctagatgccagaaccagaccagatcctggcaattagtccagtacttacaagtcataaagatgaggaaactgaagaatagggagggaaagatgacaatcaaggtctcccctaaaatatatggcagatttgggactagaacccaagtttcttggccatcactctagggctgtttccactcccgtaaacttctgccacttgggagccctgttattttcttgtgctttatggagaatagaaagtcttgggccagtggatttgcttgaagtcattattcatttccctgtacctgaggatagcaccttggagaagacagctcatctctttcccagctgagggcttgaaagtcttgcctagcaagaaattctttgatatttaacctatcatcagggctgcagttttaccagcagatttcccttccttcagcctgcagtttctgctcttttgcagctgttgtgtgtgcatgtgtttgagaataggaaaatcttacacattttaaaacttgaaaggacttcagagagagaaacacgttagagtagatatggtagattctctttccttagtgaattttcaggacttggagtaccagatatattgtggagaacccatctgtgtgaattgccagaggatatgggacacctctccagagtgtgttttttagtctcattacctcttggataaggaaggcactgaaggaaatacaccctgctccttcctcagggatggggaccctccagtccaccgctaggctatgctgctcttcatgaacatgccctgtccacccacctccccctcttcaccctcacccccactctcattcttctccgggcatcttgatctatcttcctgcttggctgtgggggctgctgggattaccgcagcacacaggcttctaattaaactaattaatcatgcctgctcctttatgcggcatccttactgttccccaagcactgtactgagagagggaggagactgaggcccaacacaagaggacccatgtggattccaggcccccttccgtggcctgcagtggtgtttgtttctcttgctgcaaagctttgtaattagcacttttatacatctttacctgcatctgtgtgctgcccacccacatgtgatttagcatccagaatgggagagaatgggttttgctgcactgggaaagtggttctctcctgctgtctgcttctgtgcccttcacatagtcctgatgagggggtcagggtcaatgataatggagctgaagatgccacattgccttcctgcagccaaaccaagtgagggaagaggggggtgtgatttggaaccctgttcacttgtaactctcagggcctcagagggcctgggaactatgcaaaaggaacagggtatcacagacaaatgccctacctgaggttctcatctcttggccccatctctttcaggtggtggaggagtcatccttcctgaccctggacatgctggagtcctgtttcccttatgtcctgcttcgaaatgcctatcgggaggtgtctcgggccttccacctaaactgaatgcctgccagtacccactgaagagccctttggaccttcctaaacccttgccatagtggaagctgtggtcactttcgcagggggtgggaatggggtggggtcactaaggagagagggtcaggagccagagttgatgagcagatctgtggaagaacaatccagggctgagaaatcgtagagcagtgaggcaggctgggagcatggaggacagcttatggaaaaagttagggcgtggggccacatgtgtgaattttacaatgaaaaaaggagtaacgtacaagtatattttctatcttctggtgacttgagcttgagctctgacaggcatgggcctctccgaccttcatcactattcttaggataatgctggcgggcagagatgatcaatcatcatattaaatcataatgagcttataatcctcccactggagctgctattgtctcctgcacattcattaggaccattatcttctctcttcctttttcaaatgtgttcagcaaacattcaacctgctcctactgcagagtagcagcaaaggagcccctcttttcctttgtggggctcttcgaggggtcattgggtctcttcctttgcccccagcttgactgcgtttcctactggggcaaggaggaagtgcccttcagagatgttcactgcccacctactctactacattgtttgttacaagttctctcttgctttaacccctcctgctttgatatctccacaacccagagcagagggtcagttagtctccgtcaattctaggttacatgacaactgattggcccagacttaggtgggttttccctcctgtaccatttgggggtactctgccttttattgggagggactaatttaaccccaaatccttttgtcagcctgggtatagctgttgctccaggaagggatttctcttctggatcttaaatttcacagacctcattaggttgtatggccctgagagtgggtatccttgagggagtacaagctgtttcaacttagcccttttctgcgctaattagaatttcaagcgtcacagagcctgggggctttcaagatagcactaaactaggtttacttaactccttggcaggaaatagtggcccccatgcatcacttctgtgaatccactgccagggagaagtggagaaacagatcatatatgtcacaggtctagagtggttggaattgacaaatataattagctagttggttaattagggtcatgtccatactttcatgatgaaagggaagcagttgtcggttttcagcaaaaacgattcagccttcctgaagcctatttgatagctgttttggggttttgtacatgtgtttgctttttatttcttgagacccaggcttagtcaatactttcttaacttggcacccataatcaacatacagatttttcttagcaacagttgtctgctctttagggtggaagcgatagagaatcctgcttcgtgcatcagcaaatcctccttccttgctatgggaagggcttatgttctaaagggtgattcagtgtcaggcttatgagactgagagtaaagttgatgaggaagaggaggctcagaagtatctgaacaactactctatatgtttatatttttctgcttgaggggatagagatccctcctccatctgcatctgcatatagaactgcttaagaggacagcaagacaagttgctgcagggggatggagggtagacagaatgcctttttttaaaactgaaaattttattgagatacttaatccacctgcacttgtaagaaatcatacagagaaattctattttcctttacacagtttccctgaatgctaacatctagcaaaactgtagtacactgccacaaccaggataactgacattgatataatctactgatcttgttcagatttccttccccagttttgcttatgttcatttctctctgtgtgtgcacgtgtgtgtgttatctatttctatacagctttatcatgtgtaggtttgtgtatctgccactgcagtcaacatacagaacaggccgggcgcagtggctcacgcctgtaatcccagcactttgggaggccaaggcaggtggatcacctgaggtcaggggtttgagagcagcctggccaatatagtgaaacaccgtctctactaaaaataccaaaactagccgggcgtggtggtgcatgcctgtagtcccactactcaggaggctgaggcagcagaataacttgatcccgggaggcggaggttgcagtaagctaagatcctgccacagcattccaggctgagtgacagagcgagactctgtctcaaaaaataaataataatttaaaaaaagatacagaacagttccatcaccacaaggatccctcgcattgctcttttatagcaattttatagcaattttctcctcccacaacccccttccccatctctagctcctggtaacacagatatattctctatttctaaaattttgtcatttgatatatctttttgtaaacatataattatacacacatatttctctaccacttatactttttcaaagtgctttcacatccttatagcaattctgcaaggtagccagggaaggctttcctatttcaggtcagaaaacagatttagaaatattaaatgacttaatgaaggtcacatgtttagcagtagaactagaactgggacccaagtctgatgttcagtcctagaccttttctacttgcccggtctgcctcttcacaagggaagacttgggttttagaatccagagaccttagaaggagcaaattggagaaggtgaggacatgatggcctttactaccggaagcaaaaagtgaatgtccagaggtgaagggacagagaagtaacaggacccatcagcatttcaggcaatttgcttcctttaccaggagggtctctgtcctcttacaacctgggaaaaaataagttgtgtcccaggttgtaagtttgctttacttaggcccaaaggaactaaagaatggatatcagaaatctcaccccaattgttttgtcttacaggcacagaataggttctagcctcagcattttcattaatgtagtgtttttattaacatctccattaacttgcttgcagcaatgagatggaattatgcctcccacaaggcctggggcaagatacttgcataggtgcccccttttgtttggacagtagaaacactgcctcccctgccatggtgttcaatccagttggcaggtgggccagcttcaaagtgcagaaggaactgggtgtggtggctcacccctgtaatcccagcactttgggaggcaggcggatcgcttgaactcaggagtttgagaccactctgggcaacacagtgaaaccctgtctctccaaaaatacaaaaaattagctgggcatggtggctgttgtctgtaatcccaacactttgggaggctgaggccagtggatctcttgagctaaggaggttaagaccagcctggtcaacatggcgaactccgtctctacaaaaaaatacgaaaattagctgggcgtagtagttcctgcctgtagtcctagctacttggaaggctgaggtggggaggatcgcttgagtccgggaggcagaggttgcagtgagcgaagatgatgccattgcactccagtctgggtgacagagcaagatcctgtctcacaaaaaaaaaaaaaaaaaaaaatgcagaaggtccagggcctggccaaggggatgatgccctgtagcactttgctttgcaggaagggaacaactgtgctgtgaataccaggatccaggagggagggagggtatatctgtgtcccccagctagggacaaggcttccttaaccttaggtcctcatgcttatattagttcttctccaacaaagtttgactttgagaagaagctggcacatggctgaaatgcactcacgcggttgggggaagagtgttcttccagtcctcctccccacagggcctcctgcttctcctaagtacctgtcatcaaaggagatgaagatgaatcccccttcagcccccacacctcaatgagttgtcaagtactctccctcccacttgaataggaagcaggagcagcaggccaggttgcaggttgaggaagtcagaagttaacttgagctgagtttgcagctctggagagattgaggagcagacttttctcttgtcactttggaaggagaggattgtgaggctgcccctttaaatagcattcccgtaggaggcagatcacatccatccgtcacctactgccaaagcatcatttttggtttctatcaaactcaaagcttgttggaaaggattgtggggttaggggagtgaggaggcagagcctcctaggggtagggggcagtttagaagctgaaaaggagaggaatgagaaggagcctgggaaaggtgggggatgaggacaagaggaaaagacagggagagaatagttgtcttttgagcctcagagtggaacaagtatacccaattcttatctgtttagagacgcagcaaggtagaaatgggattgtattgcaacaagaggaatgaggttgagactaaacaccaggactggtgactaaagaaagtgaaaggagccacagagtgaaaaaggctgatagacttggctctggttttatcacttactctctgtgagaccctataatttttctgggttagtttagttctcatttatttttatttttactttttccatcaaactgtgttgtctatgaagttttcccatttattaaatgaagggaattagagtggatgaactctaatgtctctttcacgaataactttgtgtgtgtgtgcgtgtgtgtgtgtgtgtgtgtgtgtgtgtgtgaattagccttaaaatgaatcaggagcagggggtcttgggagagcaggatgtgacactgtgttaacaagaaatgttgagagagccctctggatgtatgtcttgcctctttcccacctattctagtttaaagacctgcctaaatttggaaactccttagctctaatcctaatttactaattagagctctttagcaccatcctaatttgcaattcttttgtagtttccagcccatttcattttcagttgataaggaggagattgctcccaaattttcagaaatggactgtgtaggagtgtgactagggtctcagatgcagccatttcttggctgggtctggggaaaagccaagggatgtgtgctaaaggtagatggacagagggtgggaagtcccttattatttccacttttttctccatctctgactctgccatctctttctgcctctgtactttctgggagctggttctgctgatacttctgctgaatctaaatgctgacctaacttggcaattcttttatgttaggagtcttagctgtgacagttcatccgcttcttcgcccttccatttcacttcttttctccttctctgactgggagaggaggagcctccactcagtatttagaacagagtaaataccttctcctgatcactcctccttccaacctccagaattttttgaaattaaaattcacattctgggatcctg

SEQ ID NO: 58 - DNA, 14287 bp, Homo sapiens; identical to SEQ ID NO: 36
  source 1..14287: mol_type = genomic DNA

SEQ ID NO: 59 - protein, 532 aa, Homo sapiens
MCHQQLVISWFSLVFLASPLVAIWELKKDVYVVELDWYPDAPGEMVVLTCDTPEEDGITWTLDQSSEVLGSGKTLTIQVKEFGDAGQYTCHKGGEVLSHSLLLLHKKEDGIWSTDILKDQKEPKNKTFLRCEAKNYSGRFTCWWLTTISTDLTFSVKSSRGSSDPQGVTCGAATLSAERVRGDNKEYEYSVECQEDSACPAAEESLPIEVMVDAVHKLKYENYTSSFFIRDIIKPDPPKNLQLKPLKNSRQVEVSWEYPDTWSTPHSYFSLTFCVQVQGKSKREKKDRVFTDKTSATVICRKNASISVRAQDRYYSSSWSEWASVPCSGGGGGGSRNLPVATPDPGMFPCLHHSQNLLRAVSNMLQKARQTLEFYPCTSEEIDHEDITKDKTSTVEACLPLELTKNESCLNSRETSFITNGSCLASRKTSFMMALCLSSIYEDLKMYQVEFKTMNAKLLMDPKRQIFLDQNMLAVIDELMQALNFNSETVPQKSSLEEPDFYKTKIKLCILLHAFRIRAVTIDRVMSYLNAS

SEQ ID NO: 60 - protein, 177 aa, Homo sapiens
MEICRGLRSHLITLLLFLFHSETICRPSGRKSSKMQAFRIWDVNQKTFYLRNNQLVAGYLQGPNVNLEEKIDVVPIEPHALFLGIHGGKMCLSCVKSGDETRLQLEAVNITDLSENRKQDKRFAFIRSDSGPTTSFESAACPGWFLCTAMEADQPVSLTNMPDEGVMVTKFYFQEDE

SEQ ID NO: 61 - protein, 157 aa, Homo sapiens
MEPLRLLILLFVTELSGAHNTTVFQGVAGQSLQVSCPYDSMKHWGRRKAWCRQLGEKGPCQRVVSTHNLWLLSFLRRWNGSTAITDDTLGGTLTITLRNLQPHDAGLYQCQSLHGSEADTLRKVLVEVLADPLDHRDAGDLWFPGESESFEDAHVEH

SEQ ID NO: 62 - protein, 261 aa, Homo sapiens
MIETYNQTSPRSAATGLPISMKIFMYLLTVFLITQMIGSALFAVYLHRRLDKIEDERNLHEDFVFMKTIQRCNTGERSLSLLNCEEIKSQFEGFVKDIMLNKEETKKENSFEMQKGDQNPQIAAHVISEASSKTTSVLQWAEKGYYTMSNNLVTLENGKQLTVKRQGLYYIYAQVTFCSNREASSQAPFIASLCLKSPGRFERILLRAANTHSSAKPCGQQSIHLGGVFELQPGASVFVNVTDPSQVSHGTGFTSFGLLKL

SEQ ID NO: 63 - protein, 112 aa, Simian immunodeficiency virus
  source 1..112: note = Strain mac239
MSDPRERIPPGNSGEETIGEAFEWLNRTVEEINREAVNHLPRELIFQVWQRSWEYWHDEQGMSPSYVKYRYLCLIQKALFMHCKKGCRCLGEGHGAGGWRPGPPPPPPPGLA

SEQ ID NO: 64 - DNA, 2739 bp, synthetic construct
  source 1..2739: mol_type = other DNA
atgctgctgctggtgacaagcctgctgctgtgcgagctgccccaccccgcctttctgctgatcccccggaaagtgtgcaacggcatcggcatcggcgagttcaaggacagcctgagcatcaacgccaccaacatcaagcacttcaagaactgcaccagcatcagcggcgacctgcacatcctgcccgtggccttcaggggcgacagcttcacccacacccccccactggaccctcaggaactggacatcctgaaaaccgtgaaagagatcaccggatttctgctgattcaggcctggcccgagaaccggaccgacctgcacgccttcgagaacctggaaatcatccggggcaggaccaagcagcacggccagttcagcctggccgtggtgtccctgaacatcacaagcctgggcctgcggagcctgaaagagattagcgacggcgacgtgatcatcagcggcaacaagaacctgtgctacgccaacaccatcaactggaagaagctgttcggcaccagcggccagaaaacaaagatcatcagcaaccggggcgagaacagctgcaaggccaccggacaagtgtgccacgccctgtgtagccctgagggctgttggggacctgagcccagagactgcgtgtcctgccggaacgtgtcccggggcagagaatgcgtggacaagtgcaacctgctggaaggcgagccccgcgagttcgtggaaaacagcgagtgcatccagtgccaccccgagtgcctgccccaggccatgaacatcacctgtaccggcagaggccccgacaactgtatccagtgcgcccactacatcgacggcccccactgcgtgaaaacctgccctgccggcgtgatgggagagaacaacaccctggtctggaagtacgccgacgccggccacgtgtgccatctgtgccaccctaactgcacctacggctgcaccggccctggcctggaaggatgtcccaccaacggccccaagatccccagcattgccaccggcatggtcggcgccttgctgctgctgctggtggtggccctgggcatcggcctgtttatgagaaagaggagggccaccaacttctctttactgaaacaagctggcgacgtggaggaaaatcccggtcctatgtgtcaccagcagctggtgatcagctggttctctttagtgtttttagccagccctttagtcgccatttgggagctcaagaaggacgtgtacgtggtggagctggattggtaccccgacgctcccggcgagatggtggtgctgacatgcgacacacccgaggaagacggcatcacttggaccctcgaccaatcctccgaggtgctgggatccggcaaaacactgaccatccaagttaaggagttcggcgacgccggccagtacacttgtcacaaaggcggcgaggtgctgtcccacagcctcttattactccacaagaaagaggacggtatctggtccaccgatattttaaaggaccagaaggaacccaaaaataagacctttttaaggtgcgaggccaagaactacagcggaaggttcacttgttggtggctgaccaccatcagcaccgatctcacattcagcgtcaaatcctccagaggcagcagcgatccccaaggtgtgacatgcggagctgccaccctcagcgccgagagagtgaggggcgacaacaaagagtacgagtactccgtggagtgccaagaagatagcgcttgccccgccgctgaggagtctttacctattgaagtgatggtggacgctgtgcacaagctgaagtatgagaactataccagcagctttttcattagagacatcatcaagcccgaccctcccaagaatttacagctcaagcctttaaagaattccagacaagttgaggtgagctgggaataccccgacacttggtccaccccccactcctacttctctttaacattctgcgtgcaagttcaaggtaaaagcaagagggagaagaaggatcgtgtgttcaccgacaaaacatccgccacagtcatctgtcgtaagaatgcctccattagcgtgagggcccaagatcgttattatagcagcagctggtccgagtgggcctctgtcccttgtagcggcggaggcggaggcggttcaagaaacctgcccgtggcgacccccgatcccggcatgttcccctgcctgcaccactctcagaacctgctgagagccgtgagcaacatgctgcagaaggctagacagaccctggagttctacccctgcacaagcgaggagatcgaccacgaggacatcaccaaggacaagacaagcacagtagaggcctgcctgcccctggagctgaccaagaacgagagctgcctgaacagcagagaaacaagcttcatcaccaacggcagctgcctggcaagcagaaagacaagcttcatgatggccctgtgcctgagcagcatctacgaggacctgaagatgtaccaagtggagttcaagaccatgaacgccaagctgctgatggaccccaagagacagatcttcctggatcagaacatgctggccgtgatcgacgagctgatgcaagccctgaacttcaacagcgagaccgtgcctcagaagagcagcctggaggagcccgacttctacaagaccaagatcaagctgtgcatcctgctgcacgccttcagaatcagagccgtgaccatcgacagagtgatgagctacctgaacgcaagctaa

SEQ ID NO: 65 - protein, 912 aa, synthetic construct
MLLLVTSLLLCELPHPAFLLIPRKVCNGIGIGEFKDSLSINATNIKHFKNCTSISGDLHILPVAFRGDSFTHTPPLDPQELDILKTVKEITGFLLIQAWPENRTDLHAFENLEIIRGRTKQHGQFSLAVVSLNITSLGLRSLKEISDGDVIISGNKNLCYANTINWKKLFGTSGQKTKIISNRGENSCKATGQVCHALCSPEGCWGPEPRDCVSCRNVSRGRECVDKCNLLEGEPREFVENSECIQCHPECLPQAMNITCTGRGPDNCIQCAHYIDGPHCVKTCPAGVMGENNTLVWKYADAGHVCHLCHPNCTYGCTGPGLEGCPTNGPKIPSIATGMVGALLLLLVVALGIGLFMRKRRATNFSLLKQAGDVEENPGPMCHQQLVISWFSLVFLASPLVAIWELKKDVYVVELDWYPDAPGEMVVLTCDTPEEDGITWTLDQSSEVLGSGKTLTIQVKEFGDAGQYTCHKGGEVLSHSLLLLHKKEDGIWSTDILKDQKEPKNKTFLRCEAKNYSGRFTCWWLTTISTDLTFSVKSSRGSSDPQGVTCGAATLSAERVRGDNKEYEYSVECQEDSACPAAEESLPIEVMVDAVHKLKYENYTSSFFIRDIIKPDPPKNLQLKPLKNSRQVEVSWEYPDTWSTPHSYFSLTFCVQVQGKSKREKKDRVFTDKTSATVICRKNASISVRAQDRYYSSSWSEWASVPCSGGGGGGSRNLPVATPDPGMFPCLHHSQNLLRAVSNMLQKARQTLEFYPCTSEEIDHEDITKDKTSTVEACLPLELTKNESCLNSRETSFITNGSCLASRKTSFMMALCLSSIYEDLKMYQVEFKTMNAKLLMDPKRQIFLDQNMLAVIDELMQALNFNSETVPQKSSLEEPDFYKTKIKLCILLHAFRIRAVTIDRVMSYLNAS

SEQ ID NO: 66 - DNA, 1614 bp, synthetic construct
  source 1..1614: mol_type = other DNA
atgctgctgctggtgacaagcctgctgctgtgcgagctgccccaccccgcctttctgctgatcccccggaaagtgtgcaacggcatcggcatcggcgagttcaaggacagcctgagcatcaacgccaccaacatcaagcacttcaagaactgcaccagcatcagcggcgacctgcacatcctgcccgtggccttcaggggcgacagcttcacccacacccccccactggaccctcaggaactggacatcctgaaaaccgtgaaagagatcaccggatttctgctgattcaggcctggcccgagaaccggaccgacctgcacgccttcgagaacctggaaatcatccggggcaggaccaagcagcacggccagttcagcctggccgtggtgtccctgaacatcacaagcctgggcctgcggagcctgaaagagattagcgacggcgacgtgatcatcagcggcaacaagaacctgtgctacgccaacaccatcaactggaagaagctgttcggcaccagcggccagaaaacaaagatcatcagcaaccggggcgagaacagctgcaaggccaccggacaagtgtgccacgccctgtgtagccctgagggctgttggggacctgagcccagagactgcgtgtcctgccggaacgtgtcccggggcagagaatgcgtggacaagtgcaacctgctggaaggcgagccccgcgagttcgtggaaaacagcgagtgcatccagtgccaccccgagtgcctgccccaggccatgaacatcacctgtaccggcagaggccccgacaactgtatccagtgcgcccactacatcgacggcccccactgcgtgaaaacctgccctgccggcgtgatgggagagaacaacaccctggtctggaagtacgccgacgccggccacgtgtgccatctgtgccaccctaactgcacctacggctgcaccggccctggcctggaaggatgtcccaccaacggccccaagatccccagcattgccaccggcatggtcggcgccttgctgctgctgctggtggtggccctgggcatcggcctgtttatgagaaagaggagggccaccaacttctctttactgaaacaagctggcgacgtggaggaaaatcccggtcctatggagcccctgagactgctgatcctgctgttcgtgaccgagctgagcggcgcccacaacaccaccgtgttccaaggcgtggccggtcaaagcctacaagtgagctgcccctacgacagcatgaagcactggggcagaagaaaggcctggtgcagacagctgggcgagaagggcccctgtcagagagtggtgagcacccacaacctgtggctgctgagcttcctgagaagatggaacggcagcaccgccatcaccgacgacaccctgggcggcaccctgaccatcaccctcagaaacctgcagccccacgacgccggcctgtatcagtgtcagagcctgcacggcagcgaggccgacaccctgagaaaggtgctggtggaagtgctcgccgatcctctggaccacagagatgcgggcgacctgtggttccccggcgagagcgagagcttcgaggacgcccacgtggagcactaa

SEQ ID NO: 67 - protein, 537 aa, synthetic construct
MLLLVTSLLLCELPHPAFLLIPRKVCNGIGIGEFKDSLSINATNIKHFKNCTSISGDLHILPVAFRGDSFTHTPPLDPQELDILKTVKEITGFLLIQAWPENRTDLHAFENLEIIRGRTKQHGQFSLAVVSLNITSLGLRSLKEISDGDVIISGNKNLCYANTINWKKLFGTSGQKTKIISNRGENSCKATGQVCHALCSPEGCWGPEPRDCVSCRNVSRGRECVDKCNLLEGEPREFVENSECIQCHPECLPQAMNITCTGRGPDNCIQCAHYIDGPHCVKTCPAGVMGENNTLVWKYADAGHVCHLCHPNCTYGCTGPGLEGCPTNGPKIPSIATGMVGALLLLLVVALGIGLFMRKRRATNFSLLKQAGDVEENPGPMEPLRLLILLFVTELSGAHNTTVFQGVAGQSLQVSCPYDSMKHWGRRKAWCRQLGEKGPCQRVVSTHNLWLLSFLRRWNGSTAITDDTLGGTLTITLRNLQPHDAGLYQCQSLHGSEADTLRKVLVEVLADPLDHRDAGDLWFPGESESFEDAHVEH

SEQ ID NO: 68 - DNA, 783 bp, Mus musculus
  source 1..783: mol_type = genomic DNA
atgatcgagacctactctcagcctagccctaggagcgtggccaccggcctgcctgcaagcatgaagatcttcatgtacctgctgaccgtgttcctgatcacacagatgatcggcagcgtgctgttcgccgtgtacctgcataggaggctggacaaggtggaggaagaggtgaacctgcacgaggacttcgtgttcatcaagaagctgaagaggtgcaacaagggcgagggcagcctgagcctgctgaactgcgaggagatgaggaggcagttcgaggacctggtgaaggacatcaccctgaacaaggaggagaagaaggagaacagcttcgagatgcagaggggcgacgaggaccctcagatcgccgcccacgtggtgagcgaggccaacagcaacgccgcaagcgtgctgcagtgggccaagaagggctactacaccatgaagagcaacctggtgatgctggagaacggcaagcagctgaccgtgaagagggagggcctgtactacgtgtacacccaagtgaccttctgcagcaatagggagcctagctctcagaggcctttcatcgtgggcctgtggctgaagcctagcagcggcagcgagaggatcctgctgaaggccgccaacacccacagcagctctcagctgtgcgagcagcagagcgtgcacctgggcggcgtgttcgagctgcaagccggcgcaagcgtgttcgtgaacgtgaccgaggcaagccaagtgatccatagggtgggcttcagcagcttcggcctgctgaagctgtaa

SEQ ID NO: 69 - protein, 260 aa, Mus musculus
MIETYSQPSPRSVATGLPASMKIFMYLLTVFLITQMIGSVLFAVYLHRRLDKVEEEVNLHEDFVFIKKLKRCNKGEGSLSLLNCEEMRRQFEDLVKDITLNKEEKKENSFEMQRGDEDPQIAAHVVSEANSNAASVLQWAKKGYYTMKSNLVMLENGKQLTVKREGLYYVYTQVTFCSNREPSSQRPFIVGLWLKPSSGSERILLKAANTHSSSQLCEQQSVHLGGVFELQAGASVFVNVTEASQVIHRVGFSSFGLLKL

SEQ ID NO: 70 - protein, 177 aa, Homo sapiens; identical to SEQ ID NO: 60
